(19) United States
(12) Patent Application Publication
(10) Pub. No.: US 2023/0272098 A1
(43) Pub. Date: Aug. 31, 2023

(54) METHODS, SYSTEMS, AND KITS FOR TREATMENT OF INFLAMMATORY DISEASES TARGETING TL1A

(71) Applicants: PROMETHEUS BIOSCIENCES, INC., San Diego, CA (US); CEDARS-SINAI MEDICAL CENTER, Los Angeles, CA (US)

(72) Inventors: Laurens KRUIDENIER, San Diego, CA (US); Mahyar SABRIPOUR, San Diego, CA (US); Jeffry D. Watkins, San Diego, CA (US); Cindy T. DICKERSON, Encinitas, CA (US); Rafael ROJAS, San Marcos, CA (US); Matthew REISSMAN, San Diego, CA (US); Patricia MCNEELEY, San Diego, CA (US); Janine BILSBOROUGH, Adelaide (AU); Dermot P. MCGOVERN, Los Angeles, CA (US); Dalin LI, Los Angeles, CA (US)

(21) Appl. No.: 18/316,811

(22) Filed: May 12, 2023

Related U.S. Application Data
(63) Continuation of application No. PCT/US2021/058979, filed on Nov. 11, 2021.
(60) Provisional application No. 63/113,657, filed on Nov. 13, 2020.
(60) Provisional application No. 63/136,153, filed on Jan. 11, 2021.
(60) Provisional application No. 63/147,165, filed on Feb. 8, 2021.
(60) Provisional application No. 63/181,074, filed on Apr. 28, 2021.
(60) Provisional application No. 63/226,032, filed on Jul. 27, 2021.

(51) Int. Cl. C07K 16/28; C12Q 1/6883; C12Q 1/6851; A61P 1/04

(52) U.S. Cl. CPC C07K 16/2875; C12Q 1/6883; C12Q 1/6851; A61P 1/04; C12Q 2600/156; C12Q 2600/106; C07K 2317/52; C07K 2317/565; C07K 2317/24; C07K 2317/92; C07K 2317/76

(57) ABSTRACT

Provided are methods, systems, and kits for selecting a subject for treatment with an inhibitor of Tumor necrosis factor-like cytokine 1A (TL1A) activity or expression based on a presence of one or more genotypes associated with a positive therapeutic response to the inhibitor of TL1A. Also provided are methods, systems and kits for detecting the one or more genotypes described herein.

### CROSS-REFERENCE

[0001] This application is a continuation of International Application No. PCT/US2021/058979, filed Nov. 21, 2021, which is claims the benefit of U.S. Provisional Application No. 63/113,657, filed Nov. 13, 2020, U.S. Provisional Application No. 63/136,153, filed Jan. 11, 2021, U.S. Provisional Application No. 63/147,165, filed Feb. 8, 2021, U.S. Provisional Application No. 63/181,074, filed Apr. 28, 2021, U.S. Provisional Application No. 63/226,032, filed Jul. 27, 2021, each of which is incorporated by reference in its entirety.

### SEQUENCE LISTING

[0002] The instant application contains a Sequence Listing which has been submitted electronically in XML format and is hereby incorporated by reference in its entirety. Said copy, created on May 9, 2023, is named 56884-782_301_SL.txt and is 77,675,677 bytes in size.

### BACKGROUND

[0003] Inflammatory disease, fibrostenotic disease, and fibrotic disease pose a significant health burden worldwide due to the vast number of individuals affected and heterogeneous disease pathogenesis and varied clinical manifestations. One such disease is inflammatory bowel disease (IBD), which has two common forms, Crohn's disease (CD) and ulcerative colitis (UC). IBD is the chronic, relapsing inflammatory disorders of the gastrointestinal tract. Incidences of IBD are prevalent, affecting nearly three million individuals in the United States alone.

[0004] Few treatment options are available to patients that suffer from inflammatory disease, fibrostenotic disease, and fibrotic disease. Existing anti-inflammatory therapy such as steroids and tumor necrosis factor (TNF) inhibitors are typically used as a first line treatment for treating IBD. Unfortunately, a significant number of patients experience a lack of response or a loss of response to existing anti-inflammatory therapies, especially TNF inhibitors. While the patient is treated with an anti-inflammatory therapy that is ineffective, the disease worsens. Surgery, in the form of structureplasty (reshaping of the intestine) or resection (removal of the intestine), is the only treatment option for patients that do not respond to first line therapies. Surgical treatments for IBD are invasive, causing post operative risks for an estimated third of patients undergoing surgery, such as anastomotic leak, infection, and bleeding.

[0005] The pathogenesis of inflammatory disease, fibrostenotic disease, and fibrotic disease, like IBD, is thought to involve an uncontrolled immune response that may be triggered by certain environmental factors in a genetically susceptible individual. The heterogeneity of disease pathogenesis and clinical course, combined with the variable response to treatment and its associated side effects, suggests a personalized medicine approach to treating these diseases is the best treatment strategy. Yet there are very few personalized therapies available to patients. Accordingly, there is a need to identify targeted therapeutic approaches f or the treatment of inflammatory disease, fibrostenotic disease, and fibrotic disease and subclinical phenotypes thereof, and an even greater need to develop reliable methodology to identifying patients who, based on their genotype, may respond to any given therapeutic approach. The needed methodologies would also identify subjects not yet diagnosed who are at risk of developing the disease, for which preventative interventions could be prescribed to reduce the growing health burden.

### SUMMARY

[0006] The genotypes described herein are associated with an increase in a level of TNFSF15 (TL1A) protein expression in a sample obtained from a subject or patient, as compared to a reference level of TNFSF15 (TL1A) protein expression (e.g., derived from a normal individual). The genotypes disclosed herein are located at gene or genetic loci that are involved either directly or indirectly with TL1A-mediated or T-cell dependent inflammatory pathways. In addition, some of the genotypes provided herein are also significantly associated with inflammatory bowel disease (IBD), such as Crohn's disease (CD). The genotypes are useful for selecting a patient or a subject for treatment with an inhibitor of TL1A activity or expression. The patient may be diagnosed with IBD, CD, or both. The subject may be suspected of having IBD, CD, or both.

[0007] Disclosed herein, in some aspects is a method of treating an inflammatory, a fibrotic, or a fibrostenotic disease or condition in a subject, the method comprising administering to the subject a therapeutically effective amount of an inhibitor of Tumor necrosis factor-like cytokine 1A (TL1A) activity or expression, wherein at least three polymorphisms that are predictive of a positive therapeutic response in the subject to a treatment with the inhibitor of TL1A activity or expression with a positive predictive value or a specificity of at least about 51%, are detected in a sample obtained from the subject, and wherein the inhibitor of TL1A activity or expression is an antibody or antigen binding fragment thereof that competes for binding to human TL1A with a reference antibody comprising a heavy chain variable region comprising: (a) an HCDR1 comprising an amino acid sequence set forth by SEQ ID NO: 1; (b) an HCDR2 comprising an amino acid sequence set forth by any one of SEQ ID NOS: 2-5; and (c) an HCDR3 comprising an amino acid sequence set forth by any one of SEQ ID NOS: 6-9; and the light chain variable region comprises: (d) an LCDR1 comprising an amino acid sequence set forth by SEQ ID NO: 10; (e) an LCDR2 comprising an amino acid sequence set forth by SEQ ID NO: 11; and (f) an LCDR3 comprising an amino acid sequence set forth by any one of SEQ ID NOS: 12-15. In some embodiments, the at least three polymorphisms comprises rs16901748, rs56124762, rs6478109, rs1892231, rs2070558, rs2070561, rs11897732, rs6740739, rs17796285, rs7935393, rs12934476, rs12457255, rs2070557, rs4246905, rs10974900, rs12434976, rs2815844, rs889702, rs2409750, rs1541020, rs4942248, rs12934476, rs12457255, rs2297437, rs41309367, rs10733509, rs10750376, rs10932456, rs1326860, rs1528663, rs951279, rs9806914, rs7935393, rs1690492, rs420726, rs7759385, rs10974900, rs1326860, rs2548147, rs2815844, rs889702, rs9806914, rs7278257, or rs11221332, or a proxy polymorphism in linkage disequilibrium therewith as determined with an R2 of at least 0.85, or a combination thereof. In some embodiments, the at least three polymorphisms comprise three polymorphisms selected from Table 1 (3-SNP models). In some embodiments, the at least three polymorphisms comprise four polymorphisms selected from Table 1 (4-SNP models). In some embodiments, the at least three polymorphisms comprise five polymorphisms selected from Table 1 (5-SNP models). In some embodiments, the at least three polymorphisms comprise six polymorphisms selected from Table 1 (6-SNP models). In some embodiments, the at least three polymorphisms comprise seven polymorphisms selected from Table 1 (7-SNP models). In some embodiments, the at least three polymorphisms comprise eight polymorphisms from one or more 8-SNP models provided in Table 25. In some embodiments, the at least three polymorphisms comprise nine polymorphisms selected from Table 1 (9-SNP models). In some embodiments, the at least three polymorphisms comprise ten polymorphisms selected from Table 1 (10-SNP models).

[0008] Disclosed herein, in some aspects, is a method of treating an inflammatory, a fibrotic, or a fibrostenotic disease or condition in a subject, the method comprising administering to the subject a therapeutically effective amount of an inhibitor of Tumor necrosis factor-like cytokine 1A (TL1A) activity or expression, wherein at least three polymorphisms comprise rs16901748, rs56124762, rs6478109, rs1892231, rs2070558, rs2070561, rs11897732, rs6740739, rs17796285, rs7935393, rs12934476, rs12457255, rs2070557, rs4246905, rs10974900, rs12434976, rs2815844, rs889702, rs2409750, rs1541020, rs4942248, rs12934476, rs12457255, rs2297437, rs41309367, rs10733509, rs10750376, rs10932456, rs1326860, rs1528663, rs951279, rs9806914, rs7935393, rs1690492, rs420726, rs7759385, rs10974900, rs1326860, rs2548147, rs2815844, rs889702, rs9806914, rs7278257, or rs11221332, or a proxy polymorphism in linkage disequilibrium therewith as determined with an R2 of at least 0.85, or a combination thereof, are detected in a sample obtained from the subject, and wherein the inhibitor of TL1A activity or expression is an antibody or antigen binding fragment thereof that competes for binding to human TL1A with a reference antibody comprising a heavy chain variable region comprising: (a) an HCDR1 comprising an amino acid sequence set forth by SEQ ID NO: 1; (b) an HCDR2 comprising an amino acid sequence set forth by any one of SEQ ID NOS: 2-5; and (c) an HCDR3 comprising an amino acid sequence set forth by any one of SEQ ID NOS: 6-9; and the light chain variable region comprises: (d) an LCDR1 comprising an amino acid sequence set forth by SEQ ID NO: 10; (e) an LCDR2 comprising an amino acid sequence set forth by SEQ ID NO: 11; and (f) an LCDR3 comprising an amino acid sequence set forth by any one of SEQ ID NOS: 12-15. In some embodiments, the at least three polymorphisms comprise three polymorphisms selected from Table 1 (3-SNP models). In some embodiments, the at least three polymorphisms comprise four polymorphisms selected from Table 1 (4-SNP models). In some embodiments, the at least three polymorphisms comprise five polymorphisms selected from Table 1 (5-SNP models). In some embodiments, the at least three polymorphisms comprise six polymorphisms selected from Table 1 (6-SNP models). In some embodiments, the at least three polymorphisms comprise seven polymorphisms selected from Table 1 (7-SNP models). In some embodiments, the at least three polymorphisms comprise eight polymorphisms from one or more 8-SNP models provided in Table 25. In some embodiments, the at least three polymorphisms comprise nine polymorphisms selected from Table 1 (9-SNP models). In some embodiments, the at least three polymorphisms comprise ten polymorphisms selected from Table 1 (10-SNP models).

[0009] Disclosed herein, in some aspects is a method of treating an inflammatory, a fibrotic, or a fibrostenotic disease or condition in a subject, the method comprising administering to the subject a therapeutically effective amount of an inhibitor of Tumor necrosis factor-like cytokine 1A (TL1A) activity or expression, wherein at least three polymorphisms that are predictive of a positive therapeutic response in the subject to a treatment with the inhibitor of TL1A activity or expression with a positive predictive value or a specificity of at least about 51%, are detected in a sample obtained from the subject, and wherein the inhibitor of TL1A activity or express is an antibody or antigen binding fragment thereof that binds to TL1A, comprising a heavy chain variable region comprising: (a) an HCDR1 comprising an amino acid sequence set forth by SEQ ID NO: 1; (b) an HCDR2 comprising an amino acid sequence set forth by any one of SEQ ID NOS: 2-5; and (c) an HCDR3 comprising an amino acid sequence set forth by any one of SEQ ID NOS: 6-9; and the light chain variable region comprises: (d) an LCDR1 comprising an amino acid sequence set forth by SEQ ID NO: 10; (e) an LCDR2 comprising an amino acid sequence set forth by SEQ ID NO: 11; and (f) an LCDR3 comprising an amino acid sequence set forth by any one of SEQ ID NOS: 12-15. In some embodiments, the at least three polymorphisms comprises rs16901748, rs56124762, rs6478109, rs1892231, rs2070558, rs2070561, rs11897732, rs6740739, rs17796285, rs7935393, rs12934476, rs12457255, rs2070557, rs4246905, rs10974900, rs12434976, rs2815844, rs889702, rs2409750, rs1541020, rs4942248, rs12934476, rs12457255, rs2297437, rs41309367, rs10733509, rs10750376, rs10932456, rs1326860, rs1528663, rs951279, rs9806914, rs7935393, rs1690492, rs420726, rs7759385, rs10974900, rs1326860, rs2548147, rs2815844, rs889702, rs9806914, rs7278257, or rs11221332, or a proxy polymorphism in linkage disequilibrium therewith as determined with an R2 of at least 0.85, or a combination thereof. In some embodiments, the at least three polymorphisms comprise three polymorphisms selected from Table 1 (3-SNP models). In some embodiments, the at least three polymorphisms comprise four polymorphisms selected from Table 1 (4-SNP models). In some embodiments, the at least three polymorphisms comprise five polymorphisms selected from Table 1 (5-SNP models). In some embodiments, the at least three polymorphisms comprise six polymorphisms selected from Table 1 (6-SNP models). In some embodiments, the at least three polymorphisms comprise seven polymorphisms selected from Table 1 (7-SNP models). In some embodiments, the at least three polymorphisms comprise eight polymorphisms from one or more 8-SNP models provided in Table 25. In some embodiments, the at least three polymorphisms comprise nine polymorphisms selected from Table 1 (9-SNP models). In some embodiments, the at least three polymorphisms comprise ten polymorphisms selected from Table 1 (10-SNP models).

[0010] Disclosed herein, in some aspects is a method of treating an inflammatory, a fibrotic, or a fibrostenotic disease or condition in a subject, the method comprising administering to the subject a therapeutically effective amount of an inhibitor of Tumor necrosis factor-like cytokine 1A (TL1A) activity or expression, wherein at least three polymorphisms comprise rs16901748, rs56124762, rs6478109, rs1892231, rs2070558, rs2070561, rs11897732, rs6740739, rs17796285, rs7935393, rs12934476, rs12457255, rs2070557, rs4246905, rs10974900, rs12434976, rs2815844, rs889702, rs2409750, rs1541020, rs4942248, rs12934476, rs12457255, rs2297437, rs41309367, rs10733509, rs10750376, rs10932456, rs1326860, rs1528663, rs951279, rs9806914, rs7935393, rs1690492, rs420726, rs7759385, rs10974900, rs1326860, rs2548147, rs2815844, rs889702, rs9806914, rs7278257, or rs11221332, or a proxy polymorphism in linkage disequilibrium therewith as determined with an R2 of at least 0.85, or a combination thereof, are detected in a sample obtained from the subject, and wherein the inhibitor of TL1A activity or express is an antibody or antigen binding fragment thereof that binds to TL1A, comprising a heavy chain variable region comprising: (a) an HCDR1 comprising an amino acid sequence set forth by SEQ ID NO: 1; (b) an HCDR2 comprising an amino acid sequence set forth by any one of SEQ ID NOS: 2-5; and (c) an HCDR3 comprising an amino acid sequence set forth by any one of SEQ ID NOS: 6-9; and the light chain variable region comprises: (d) an LCDR1 comprising an amino acid sequence set forth by SEQ ID NO: 10; (e) an LCDR2 comprising an amino acid sequence set forth by SEQ ID NO: 11; and (f) an LCDR3 comprising an amino acid sequence set forth by any one of SEQ ID NOS: 12-15. In some embodiments, the at least three polymorphisms comprise three polymorphisms selected from Table 1 (3-SNP models). In some embodiments, the at least three polymorphisms comprise four polymorphisms selected from Table 1 (4-SNP models). In some embodiments, the at least three polymorphisms comprise five polymorphisms selected from Table 1 (5-SNP models). In some embodiments, the at least three polymorphisms comprise six polymorphisms selected from Table 1 (6-SNP models). In some embodiments, the at least three polymorphisms comprise seven polymorphisms selected from Table 1 (7-SNP models). In some embodiments, the at least three polymorphisms comprise eight polymorphisms from one or more 8-SNP models provided in Table 25. In some embodiments, the at least three polymorphisms comprise nine polymorphisms selected from Table 1 (9-SNP models). In some embodiments, the at least three polymorphisms comprise ten polymorphisms selected from Table 1 (10-SNP models).

[0011] Disclosed herein, in some aspects is a method of treating an inflammatory, a fibrotic, or a fibrostenotic disease or condition in a subject, the method comprising administering to the subject a therapeutically effective amount of an inhibitor of Tumor necrosis factor-like cytokine 1A (TL1A) activity or expression, wherein at least three polymorphisms that are predictive of a positive therapeutic response in the subject to a treatment with the inhibitor of TL1A activity or expression with a positive predictive value or a specificity of at least about 51%, are detected in a sample obtained from the subject, and wherein the inhibitor of TL1A activity or express is an antibody or antigen binding fragment thereof that binds to tumor necrosis factor-like protein 1A (TL1A), comprising a heavy chain variable domain comprising an amino acid sequence at least about 90% identical to any one of SEQ ID NOS: 101-135, or 310-302, and a light chain variable domain comprising an amino acid sequence at least about 90% identical to any one of SEQ ID NOS: 201-206 or 303. In some embodiments, the at least three polymorphisms comprises rs16901748, rs56124762, rs6478109, rs1892231, rs2070558, rs2070561, rs11897732, rs6740739, rs17796285, rs7935393, rs12934476, rs12457255, rs2070557, rs4246905, rs10974900, rs12434976, rs2815844, rs889702, rs2409750, rs1541020, rs4942248, rs12934476, rs12457255, rs2297437, rs41309367, rs10733509, rs10750376, rs10932456, rs1326860, rs1528663, rs951279, rs9806914, rs7935393, rs1690492, rs420726, rs7759385, rs10974900, rs1326860, rs2548147, rs2815844, rs889702, rs9806914, rs7278257, or rs11221332, or a proxy polymorphism in linkage disequilibrium therewith as determined with an R2 of at least 0.85, or a combination thereof. In some embodiments, the heavy chain variable domain comprises an amino acid sequence at least about 91%, 92%, 93%, 94%, 95%, 96%, 97%, 98%, 99%, or 100% identical to any one of SEQ ID NOS: 101-135, or 310-302. In some embodiments, the light chain variable domain comprises an amino acid sequence at least about 91%, 92%, 93%, 94%, 95%, 96%, 97%, 98%, 99%, or 100% identical to any one of SEQ ID NOS: 201-206 or 303. In some embodiments, the at least three polymorphisms comprise three polymorphisms selected from Table 1 (3-SNP models). In some embodiments, the at least three polymorphisms comprise four polymorphisms selected from Table 1 (4-SNP models). In some embodiments, the at least three polymorphisms comprise five polymorphisms selected from Table 1 (5-SNP models). In some embodiments, the at least three polymorphisms comprise six polymorphisms selected from Table 1 (6-SNP models). In some embodiments, the at least three polymorphisms comprise seven polymorphisms selected from Table 1 (7-SNP models). In some embodiments, the at least three polymorphisms comprise eight polymorphisms from one or more 8-SNP models provided in Table 25. In some embodiments, the at least three polymorphisms comprise nine polymorphisms selected from Table 1 (9-SNP models). In some embodiments, the at least three polymorphisms comprise ten polymorphisms selected from Table 1 (10-SNP models).

[0012] Disclosed herein, in some aspects is a method of treating an inflammatory, a fibrotic, or a fibrostenotic disease or condition in a subject, the method comprising administering to the subject a therapeutically effective amount of an inhibitor of Tumor necrosis factor-like cytokine 1A (TL1A) activity or expression, wherein at least three polymorphisms comprise rs16901748, rs56124762, rs6478109, rs1892231, rs2070558, rs2070561, rs11897732, rs6740739, rs17796285, rs7935393, rs12934476, rs12457255, rs2070557, rs4246905, rs10974900, rs12434976, rs2815844, rs889702, rs2409750, rs1541020, rs4942248, rs12934476, rs12457255, rs2297437, rs41309367, rs10733509, rs10750376, rs10932456, rs1326860, rs1528663, rs951279, rs9806914, rs7935393, rs1690492, rs420726, rs7759385, rs10974900, rs1326860, rs2548147, rs2815844, rs889702, rs9806914, rs7278257, or rs11221332, or a proxy polymorphism in linkage disequilibrium therewith as determined with an R2 of at least 0.85, or a combination thereof, are detected in a sample obtained from the subject, and wherein the inhibitor of TL1A activity or express is an antibody or antigen binding fragment thereof that binds to tumor necrosis factor-like protein 1A (TL1A), comprising a heavy chain variable domain comprising an amino acid sequence at least about 90% identical to any one of SEQ ID NOS: 101-135, or 310-302, and a light chain variable domain comprising an amino acid sequence at least about 90% identical to any one of SEQ ID NOS: 201-206 or 303. In some embodiments, the at least three polymorphisms comprise three polymorphisms selected from Table 1 (3-SNP models). In some embodiments, the at least three polymorphisms comprise four polymorphisms selected from Table 1 (4-SNP models). In some embodiments, the at least three polymorphisms comprise five polymorphisms selected from Table 1 (5-SNP models). In some embodiments, the at least three polymorphisms comprise six polymorphisms selected from Table 1 (6-SNP models). In some embodiments, the at least three polymorphisms comprise seven polymorphisms selected from Table 1 (7-SNP models). In some embodiments, the at least three polymorphisms comprise eight polymorphisms from one or more 8-SNP models provided in Table 25. In some embodiments, the at least three polymorphisms comprise nine polymorphisms selected from Table 1 (9-SNP models). In some embodiments, the at least three polymorphisms comprise ten polymorphisms selected from Table 1 (10-SNP models).

[0013] Disclosed herein, in some aspects is a method of treating an inflammatory, a fibrotic, or a fibrostenotic disease or condition in a subject, the method comprising administering to the subject a therapeutically effective amount of an inhibitor of Tumor necrosis factor-like cytokine 1A (TL1A) activity or expression, wherein at least three polymorphisms that are predictive of a positive therapeutic response in the subject to a treatment with the inhibitor of TL1A activity or expression with a positive predictive value or a specificity of at least about 51%, are detected in a sample obtained from the subject, and wherein the inhibitor of TL1A activity or express is an antibody or antigen binding fragment thereof that binds to TL1A that comprises: (a) a heavy chain variable framework region comprising a human IGHV1-46*02 framework or a modified human IGHV1-46*02 framework; and (b) a light chain variable framework region comprising a human IGKV3-20 framework or a modified human IGKV3-20 framework; wherein the heavy chain variable framework region and the light chain variable framework region collectively comprise less than about 14 amino acid modifications from the human IGHV1-46*02 framework and the human IGKV3-20 framework. In some embodiments, the at least three polymorphisms comprise rs16901748, rs56124762, rs6478109, rs1892231, rs2070558, rs2070561, rs11897732, rs6740739, rs17796285, rs7935393, rs12934476, rs12457255, rs2070557, rs4246905, rs10974900, rs12434976, rs2815844, rs889702, rs2409750, rs1541020, rs4942248, rs12934476, rs12457255, rs2297437, rs41309367, rs10733509, rs10750376, rs10932456, rs1326860, rs1528663, rs951279, rs9806914, rs7935393, rs1690492, rs420726, rs7759385, rs10974900, rs1326860, rs2548147, rs2815844, rs889702, rs9806914, rs7278257, or rs11221332, or a proxy polymorphism in linkage disequilibrium therewith as determined with an R2 of at least 0.85, or a combination thereof. In some embodiments, the at least three polymorphisms comprise three polymorphisms selected from Table 1 (3-SNP models). In some embodiments, the at least three polymorphisms comprise four polymorphisms selected from Table 1 (4-SNP models). In some embodiments, the at least three polymorphisms comprise five polymorphisms selected from Table 1 (5-SNP models). In some embodiments, the at least three polymorphisms comprise six polymorphisms selected from Table 1 (6-SNP models). In some embodiments, the at least three polymorphisms comprise seven polymorphisms selected from Table 1 (7-SNP models). In some embodiments, the at least three polymorphisms comprise eight polymorphisms from one or more 8-SNP models provided in Table 25. In some embodiments, the at least three polymorphisms comprise nine polymorphisms selected from Table 1 (9-SNP models). In some embodiments, the at least three polymorphisms comprise ten polymorphisms selected from Table 1 (10-SNP models).

[0014] Disclosed herein, in some aspects is a method of treating an inflammatory, a fibrotic, or a fibrostenotic disease or condition in a subject, the method comprising administering to the subject a therapeutically effective amount of an inhibitor of Tumor necrosis factor-like cytokine 1A (TL1A) activity or expression, wherein at least three polymorphisms comprise rs16901748, rs56124762, rs6478109, rs1892231, rs2070558, rs2070561, rs11897732, rs6740739, rs17796285, rs7935393, rs12934476, rs12457255, rs2070557, rs4246905, rs10974900, rs12434976, rs2815844, rs889702, rs2409750, rs1541020, rs4942248, rs12934476, rs12457255, rs2297437, rs41309367, rs10733509, rs10750376, rs10932456, rs1326860, rs1528663, rs951279, rs9806914, rs7935393, rs1690492, rs420726, rs7759385, rs10974900, rs1326860, rs2548147, rs2815844, rs889702, rs9806914, rs7278257, or rs11221332, or a proxy polymorphism in linkage disequilibrium therewith as determined with an R2 of at least 0.85, or a combination thereof, are detected in a sample obtained from the subject, and wherein the inhibitor of TL1A activity or express is an antibody or antigen binding fragment thereof that binds to TL1A that comprises: (a) a heavy chain variable framework region comprising a human IGHV1-46*02 framework or a modified human IGHV1-46*02 framework; and (b) a light chain variable framework region comprising a human IGKV3-20 framework or a modified human IGKV3-20 framework; wherein the heavy chain variable framework region and the light chain variable framework region collectively comprise less than about 14 amino acid modifications from the human IGHV1-46*02 framework and the human IGKV3-20 framework. In some embodiments, an amino acid modification of the less than 14 amino acid modifications comprises: (a) the amino acid modification is at position 47 in the heavy chain variable region, and the amino acid at position 47 is R, N, D, C, Q, E, G, H, I, L, K, M, F, P, S, T, W, Y, or V; (b) the amino acid modification is at position 45 in the heavy chain variable region, and the amino acid at position 45 is A, N, D, C, Q, E, G, H, I, L, K, M, F, P, S, T, W, Y, or V; (c) the amino acid modification is at position 55 in the heavy chain variable region, and the amino acid at position 55 is A, R, N, D, C, Q, E, G, H, I, L, K, F, P, S, T, W, Y, or V; (d) the amino acid modification is at position 78 in the heavy chain variable region, and the amino acid at position 78 is A, R, N, D, C, Q, E, G, H, I, L, K, M, F, P, S, T, W, or Y; (e) the amino acid modification is at position 80 in the heavy chain variable region, and the amino acid at position 80 is A, R, N, D, C, Q, E, G, H, I, L, K, F, P, S, T, W, Y, or V; (f) the amino acid modification is at position 82 in the heavy chain variable region, and the amino acid at position 82 is A, N, D, C, Q, E, G, H, I, L, K, M, F, P, S, T, W, Y, or V; (g) the amino acid modification is at position 89 in the heavy chain variable region, and the amino acid at position 89 is A, R, N, D, C, Q, E, G, H, I, L, K, M, F, P, S, T, W, or Y; or (h) the amino acid modification is at position 91 in the heavy chain variable region, and the amino acid at position 91 is A, R, N, D, C, Q, E, G, H, I, L, K, F, P, S, T, W, Y, or V; or a combination of two or more modifications selected from (a) to (h). In some embodiments, an amino acid modification of the less than 14 amino acid modifications comprises: A47R, R45K, M55I, V78A, M80I, R82T, V89A, M91L in the heavy chain variable region, per Aho or Kabat numbering. In some embodiments, an amino acid modification of the less than 14 amino acid modifications comprises: (a) a modification at amino acid position 54 in the light chain variable region; and/or (b) a modification at amino acid position 55 in the light chain variable region; per Aho or Kabat numbering. In some embodiments, an amino acid modification of the less than 14 amino acid modifications comprises: (a) the amino acid modification is at position 54 of the light chain variable region, and the amino acid at position 54 is A, R, N, D, C, Q, E, G, H, I, K, M, F, P, S, T, W, Y, or V; and/or (b) the amino acid modification is at position 55 of the light chain variable region, and the amino acid at position 55 is A, R, N, D, C, Q, E, G, H, I, K, M, F, P, S, T, W, Y, or V. In some embodiments, an amino acid modification of the less than 14 amino acid modifications comprises L54P and/or L55W in the light chain variable region, per Aho or Kabat numbering. In some embodiments, the at least three polymorphisms comprise three polymorphisms selected from Table 1 (3-SNP models). In some embodiments, the at least three polymorphisms comprise four polymorphisms selected from Table 1 (4-SNP models). In some embodiments, the at least three polymorphisms comprise five polymorphisms selected from Table 1 (5-SNP models). In some embodiments, the at least three polymorphisms comprise six polymorphisms selected from Table 1 (6-SNP models). In some embodiments, the at least three polymorphisms comprise seven polymorphisms selected from Table 1 (7-SNP models). In some embodiments, the at least three polymorphisms comprise eight polymorphisms from one or more 8-SNP models provided in Table 25. In some embodiments, the at least three polymorphisms comprise nine polymorphisms selected from Table 1 (9-SNP models). In some embodiments, the at least three polymorphisms comprise ten polymorphisms selected from Table 1 (10-SNP models).

[0015] Disclosed herein, in some aspects is a method of treating an inflammatory, a fibrotic, or a fibrostenotic disease or condition in a subject, the method comprising administering to the subject a therapeutically effective amount of an inhibitor of Tumor necrosis factor-like cytokine 1A (TL1A) activity or expression, wherein at least three polymorphisms that are predictive of a positive therapeutic response in the subject to a treatment with the inhibitor of TL1A activity or expression with a positive predictive value or a specificity of at least about 51%, are detected in a sample obtained from the subject, and wherein the inhibitor of TL1A activity or express is an antibody or antigen binding fragment thereof that binds to TL1A and comprises: a heavy chain variable region comprising SEQ ID NO: 301 X1VQLVQSGAEVKKPGASVKVSCKAS[HCDR1]WVX2QX3PGQGLEWX4G[HCDR2]RX5TX6TX7DTSTSTX8YX9ELSSLRSEDTAVYYCAR[HCDR3]WGQGTTVTVSS, and a light chain variable region comprising SEQ ID NO: 303 EIVLTQSPGTLSLSPGERATLSC[LCDR1]WYQQKPGQAPRX10X11IY[LCDR2]GIPDR FSGSGSGTDFTLTISRLEPEDFAVYYC[LCDR3]FGGGTKLEIK, wherein each of X1-X11 is independently selected from A, R, N, D, C, Q, E, G, H, I, L, K, M, F, P, S, T, W, Y, or V. In some embodiments, the at least three polymorphisms comprise three polymorphisms selected from Table 1 (3-SNP models). In some embodiments, the at least three polymorphisms comprise four polymorphisms selected from Table 1 (4-SNP models). In some embodiments, the at least three polymorphisms comprise five polymorphisms selected from Table 1 (5-SNP models). In some embodiments, the at least three polymorphisms comprise six polymorphisms selected from Table 1 (6-SNP models). In some embodiments, the at least three polymorphisms comprise seven polymorphisms selected from Table 1 (7-SNP models). In some embodiments, the at least three polymorphisms comprise eight polymorphisms from one or more 8-SNP models provided in Table 25. In some embodiments, the at least three polymorphisms comprise nine polymorphisms selected from Table 1 (9-SNP models). In some embodiments, the at least three polymorphisms comprise ten polymorphisms selected from Table 1 (10-SNP models).

[0016] Disclosed herein, in some aspects is a method of treating an inflammatory, a fibrotic, or a fibrostenotic disease or condition in a subject, the method comprising administering to the subject a therapeutically effective amount of an inhibitor of Tumor necrosis factor-like cytokine 1A (TL1A) activity or expression, wherein at least three polymorphisms that are predictive of a positive therapeutic response in the subject to a treatment with the inhibitor of TL1A activity or expression with a positive predictive value or a specificity of at least about 51%, are detected in a sample obtained from the subject, and wherein the inhibitor of TL1A activity or express is an antibody or antigen binding fragment thereof that binds to TL1A and comprises: a heavy chain variable region comprising SEQ ID NO: 302 X1VQLVQSGAEVKKPGASVKVSCKAS[HCDR1]WVX2QX3PGQGLEWX4G[HCDR2]RX5TX6TX7DTSTSTX8YX9ELSSLRSEDTAVYYC[HCDR3]WGQGTTVTVSS, and a light chain variable region comprising SEQ ID NO: 303 EIVLTQSPGTLSLSPGERATLSC[LCDR1]WYQQKPGQAPRX10X11IY[LCDR2]GIPDR FSGSGSGTDFTLTISRLEPEDFAVYYC[LCDR3]FGGGTKLEIK, wherein each of X1-X11 is independently selected from A, R, N, D, C, Q, E, G, H, I, L, K, M, F, P, S, T, W, Y, or V. In some embodiments, the at least three polymorphisms comprises rs16901748, rs56124762, rs6478109, rs1892231, rs2070558, rs2070561, rs11897732, rs6740739, rs17796285, rs7935393, rs12934476, rs12457255, rs2070557, rs4246905, rs10974900, rs12434976, rs2815844, rs889702, rs2409750, rs1541020, rs4942248, rs12934476, rs12457255, rs2297437, rs41309367, rs10733509, rs10750376, rs10932456, rs1326860, rs1528663, rs951279, rs9806914, rs7935393, rs1690492, rs420726, rs7759385, rs10974900, rs1326860, rs2548147, rs2815844, rs889702, rs9806914, rs7278257, or rs11221332, or a proxy polymorphism in linkage disequilibrium therewith as determined with an R2 of at least 0.85, or a combination thereof. In some embodiments, the at least three polymorphisms comprise three polymorphisms selected from Table 1 (3-SNP models). In some embodiments, the at least three polymorphisms comprise four polymorphisms selected from Table 1 (4-SNP models). In some embodiments, the at least three polymorphisms comprise five polymorphisms selected from Table 1 (5-SNP models). In some embodiments, the at least three polymorphisms comprise six polymorphisms selected from Table 1 (6-SNP models). In some embodiments, the at least three polymorphisms comprise seven polymorphisms selected from Table 1 (7-SNP models). In some embodiments, the at least three polymorphisms comprise eight polymorphisms from one or more 8-SNP models provided in Table 25. In some embodiments, the at least three polymorphisms comprise nine polymorphisms selected from Table 1 (9-SNP models). In some embodiments, the at least three polymorphisms comprise ten polymorphisms selected from Table 1 (10-SNP models).

[0017] Disclosed herein, in some aspects is a method of treating an inflammatory, a fibrotic, or a fibrostenotic disease or condition in a subject, the method comprising administering to the subject a therapeutically effective amount of an inhibitor of Tumor necrosis factor-like cytokine 1A (TL1A) activity or expression, wherein at least three polymorphisms comprise rs16901748, rs56124762, rs6478109, rs1892231, rs2070558, rs2070561, rs11897732, rs6740739, rs17796285, rs7935393, rs12934476, rs12457255, rs2070557, rs4246905, rs10974900, rs12434976, rs2815844, rs889702, rs2409750, rs1541020, rs4942248, rs12934476, rs12457255, rs2297437, rs41309367, rs10733509, rs10750376, rs10932456, rs1326860, rs1528663, rs951279, rs9806914, rs7935393, rs1690492, rs420726, rs7759385, rs10974900, rs1326860, rs2548147, rs2815844, rs889702, rs9806914, rs7278257, or rs11221332, or a proxy polymorphism in linkage disequilibrium therewith as determined with an R2 of at least 0.85, or a combination thereof, are detected in a sample obtained from the subject, and wherein the inhibitor of TL1A activity or express is an antibody or antigen binding fragment thereof that binds to TL1A and comprises: a heavy chain variable region comprising SEQ ID NO: 301 X1VQLVQSGAEVKKPGASVKVSCKAS[HCDR1]WVX2QX3PGQGLEWX4G[HCDR2]RX5TX6TX7DTSTSTX8YX9ELSSLRSEDTAVYYCAR[HCDR3]WGQGTTVTVSS, and a light chain variable region comprising SEQ ID NO: 303 EIVLTQSPGTLSLSPGERATLSC[LCDR1]WYQQKPGQAPRX10X11IY[LCDR2]GIPDR FSGSGSGTDFTLTISRLEPEDFAVYYC[LCDR3]FGGGTKLEIK, wherein each of X1-X11 is independently selected from A, R, N, D, C, Q, E, G, H, I, L, K, M, F, P, S, T, W, Y, or V. In some embodiments, the at least three polymorphisms comprise three polymorphisms selected from Table 1 (3-SNP models). In some embodiments, the at least three polymorphisms comprise four polymorphisms selected from Table 1 (4-SNP models). In some embodiments, the at least three polymorphisms comprise five polymorphisms selected from Table 1 (5-SNP models). In some embodiments, the at least three polymorphisms comprise six polymorphisms selected from Table 1 (6-SNP models). In some embodiments, the at least three polymorphisms comprise seven polymorphisms selected from Table 1 (7-SNP models). In some embodiments, the at least three polymorphisms comprise eight polymorphisms from one or more 8-SNP models provided in Table 25. In some embodiments, the at least three polymorphisms comprise nine polymorphisms selected from Table 1 (9-SNP models). In some embodiments, the at least three polymorphisms comprise ten polymorphisms selected from Table 1 (10-SNP models).

[0018] Disclosed herein, in some aspects is a method of treating an inflammatory, a fibrotic, or a fibrostenotic disease or condition in a subject, the method comprising administering to the subject a therapeutically effective amount of an inhibitor of Tumor necrosis factor-like cytokine 1A (TL1A) activity or expression, wherein at least three polymorphisms comprise rs16901748, rs56124762, rs6478109, rs1892231, rs2070558, rs2070561, rs11897732, rs6740739, rs17796285, rs7935393, rs12934476, rs12457255, rs2070557, rs4246905, rs10974900, rs12434976, rs2815844, rs889702, rs2409750, rs1541020, rs4942248, rs12934476, rs12457255, rs2297437, rs41309367, rs10733509, rs10750376, rs10932456, rs1326860, rs1528663, rs951279, rs9806914, rs7935393, rs1690492, rs420726, rs7759385, rs10974900, rs1326860, rs2548147, rs2815844, rs889702, rs9806914, rs7278257, or rs11221332, or a proxy polymorphism in linkage disequilibrium therewith as determined with an R2 of at least 0.85, or a combination thereof, are detected in a sample obtained from the subject, and wherein the inhibitor of TL1A activity or express is an antibody or antigen binding fragment thereof that binds to TL1A and comprises: a heavy chain variable region comprising SEQ ID NO: 302 X1VQLVQSGAEVKKPGASVKVSCKAS[HCDR1]WVX2QX3PGQGLEWX4G[HCDR2]RX5TX6TX7DTSTSTX8YX9ELSSLRSEDTAVYYC[HCDR3]WGQGTTVTVSS, and a light chain variable region comprising SEQ ID NO: 303 EIVLTQSPGTLSLSPGERATLSC[LCDR1]WYQQKPGQAPRX10X11IY[LCDR2]GIPDR FSGSGSGTDFTLTISRLEPEDFAVYYC[LCDR3]FGGGTKLEIK, wherein each of X1-X11 is independently selected from A, R, N, D, C, Q, E, G, H, I, L, K, M, F, P, S, T, W, Y, or V
[0019] In some embodiments: (A) X1 is Q or E; (B) X2 is R or K (C) X3 is A or R; (D) X4 is M or I; (E) X5 is V or A; (F) X6 is M or I; (G) X7 is R or T; (H) X8 is V or A; (I) X9 is M or L(J) X10 is L or P; (K) X11 is L or W; or
[0020] (L) X1-X11 are any combination of (a) to (k). In some embodiments, the antibody or antigen binding fragment comprises a heavy chain CDR1 as set forth by SEQ ID NO: 1, a heavy chain CDR2 as set forth by any one of SEQ ID NOS: 2-5, a heavy chain CDR3 as set forth by any one of SEQ ID NOS: 6-9, a light chain CDR1 as set forth by SEQ ID NO: 10, a light chain CDR2 as set forth by SEQ ID NO: 11, and a light chain CDR3 as set forth by any one of SEQ ID NOS: 12-15. In some embodiments, the antibody or antigen binding fragment comprises a heavy chain framework (FR) 1 as set forth by SEQ ID NO: 304, a heavy chain FR2 as set forth by SEQ ID NO: 305 or SEQ ID NO: 313, a heavy chain FR3 as set forth by any one of SEQ ID NOS: 306, 307, 314, or 315, a heavy chain FR4 as set forth by SEQ ID NO: 308, a light chain FR1 as set forth by SEQ ID NO: 309, a light chain FR2 as set forth by SEQ ID NO: 310, a light chain FR3 as set forth by SEQ ID NO: 311, or a light chain FR4 as set forth by SEQ ID NO: 312, or a combination thereof. In some embodiments, the antibody or antigen binding fragment comprises a human IgG1 Fc region comprising (a) 297A, 297Q, 297G, or 297D, (b) 279F, 279K, or 279L, (c) 228P, (d) 235A, 235E, 235G, 235Q, 235R, or 235S, (e) 237A, 237E, 237K, 237N, or 237R, (f) 234A, 234V, or 234F, (g) 233P, (h) 328A, (i) 327Q or 327T, (j) 329A, 329G, 329Y, or 329R (k) 331S, (1) 236F or 236R, (m) 238A, 238E, 238G, 238H, 238I, 238V, 238 W, or238Y, (n) 248A, (o) 254D, 254E, 254G, 254H, 254I, 254N, 254P, 254Q, 254T, or 254V, (p) 255N, (q) 256H, 256K, 256R, or 256V, (r) 264S, (s) 265H, 265K, 265S, 265Y, or 265A, (t) 267G, 267H, 267I, or 267K, (u) 268K, (v) 269N or 269Q, (w) 270A, 270G, 270M, or 270N, (x) 271T, (y) 272N, (z) 292E, 292F, 292G, or 292I, (aa) 293S, (bb) 301 W, (cc) 304E, (dd) 311E, 311G, or 311S, (ee) 316F, (ff) 328V, (gg) 330R, (hh) 339E or 339L, (ii) 343I or 343V, (jj) 373A, 373G, or 373S, (kk) 376E, 376 W, or 376Y, (11) 380D, (mm) 382D or 382P, (nn) 385P, (oo) 424H, 424M, or 424V, (pp) 434I, (qq) 438G, (rr) 439E, 439H, or 439Q, (ss) 440A, 440D, 440E, 440F, 440M, 440T, or 440V, (tt) E233P, (uu) L235E, (vv) L234A and L235A, (ww) L234A, L235A, and G237A, (xx) L234A, L235A, and P329G, (yy) L234F, L235E, and P331S, (zz) L234A, L235E, and G237A, (aaa), L234A, L235E, G237A, and P331S (bbb) L234A, L235A, G237A, P238S, H268A, A330S, and P331 S (IgG1 σ, (ccc) L234A, L235A, and P329A, (ddd) G236R and L328R, (eee) G237A, (fff) F241A, (ggg) V264A, (hhh) D265A, (iii) D265A and N297A, (jjj) D265A and N297G, (kkk) D270A, (111) A330L, (mmm) P331A or P331S, or (nnn) any combination of two or more selected from (a)-(uu), per Kabat numbering. In some embodiments, the antibody or antigen binding fragment comprises a human IgG4 Fc region. In some embodiments, the antibody or antigen binding fragment comprises a Fc region comprising a sequence at least about 90%, 91%, 92%, 93%, 94%, 95%, 96%, 97%, 98%, 99%, or 100% identical to any one of SEQ ID NOS: 320-362. In some embodiments, the antibody of antigen binding fragment comprises and a fragment crystallizable (Fc) region comprising reduced antibody-dependent cell-mediated cytotoxicity (ADCC) function as compared to human IgG1 and/or reduced complement-dependent cytotoxicity (CDC) as compared to human IgG1. In some embodiments, the Fc comprises the human IgG1 comprises SEQ ID NO: 320. In some embodiments, the ADCC function of the Fc region comprising reduced ADCC is at least about 50% reduced as compared to human IgG1. In some embodiments, the CDC function of the Fc region comprising reduced CDC is at least about 50% reduced as compared to human IgG1. In some embodiments, the Fc comprises (i) a human IgG4 Fc region or (ii) a human IgG4 Fc region comprising (a) S228P, (b) S228P and L235E, or (c) S228P, F234A, and L235A, per Kabat numbering. In some embodiments, the Fc comprises a human IgG2 Fc region; IgG2-IgG4 cross-subclass Fc region; IgG2-IgG3 cross-subclass Fc region; IgG2 comprising H268Q, V309L, A330S, P331S (IgG2m4); or IgG2 comprising V234A, G237A, P238S, H268A, V309L, A330S, P331S (IgG26). In some embodiments, the Fc comprises a human IgG1 with a substitution selected from 329A, 329G, 329Y, 331S, 236F, 236R, 238A, 238E, 238G, 238H, 238I, 238V, 238 W, 238Y, 248A, 254D, 254E, 254G, 254H, 254I, 254N, 254P, 254Q, 254T, 254V, 264S, 265H, 265K, 265S, 265Y, 265A, 267G, 267H, 267I, 267K, 434I, 438G, 439E, 439H, 439Q, 440A, 440D, 440E, 440F, 440M, 440T, and 440V, per Kabat numbering. In some embodiments, the Fc comprises a sequence at least about 90%, 91%, 92%, 93%, 94%, 95%, 96%, 97%, 98%, 99%, or 100% identical to any one of SEQ ID NOS: 320-362. In some embodiments, the Fc comprises any one of SEQ ID NOs: 401-413 or a sequence at least about 90%, 91%, 92%, 93%, 94%, 95%, 96%, 97%, 98%, or 99% identical to any one of SEQ ID NOs: 401-413. In some embodiments, the antibody or antigen binding fragment comprises a heavy chain comprising any one of SEQ ID NOs: 501-513 or a sequence at least about 90%, 91%, 92%, 93%, 94%, 95%, 96%, 97%, 98%, or 99% identical to any one of SEQ ID NOs: 501-513. In some embodiments, the antibody or antigen binding fragment comprises a light chain comprising any one of SEQ ID NO: 514 or a sequence at least about 90%, 91%, 92%, 93%, 94%, 95%, 96%, 97%, 98%, or 99% identical to any one of SEQ ID NO: 514. In some embodiments, the at least three polymorphisms are predictive of the positive therapeutic response with the positive predictive value and a specificity of at least about 51%. In some embodiments, the positive predictive value is greater than or equal about 60%, 65%, 70%, 75%, 76%, 77%, 78%, 79%, 80%, 81%, 82%, 83%, 84%, 85%, 86%, 87%, 88%, 89%, 90%, 91%, 92%, 93%, 94%, 95%, 96%, 97%, 98%, 99%, or 100%. In some embodiments, the positive predictive value is between about 60%-100%, 65%-95%, 70%-90%, 75%-85%, and 70%-80%. In some embodiments, the specificity is greater than or equal to about 60%, 65%, 70%, 75%, 76%, 77%, 78%, 79%, 80%, 81%, 82%, 83%, 84%, 85%, 86%, 87%, 88%, 89%, 90%, 91%, 92%, 93%, 94%, 95%, 96%, 97%, 98%, 99%, or 100%. In some embodiments, the specificity is between about 60%-100%, 65%-95%, 70%-90%, 75%-85%, and 70%-80%. In some embodiments, the at least three polymorphisms comprise: rs6478109, rs56124762, and rs1892231. In some embodiments, the at least three polymorphisms comprise: rs6478109, rs56124762, and rs16901748. In some embodiments, the at least three polymorphisms comprise: rs6478109, rs1892231, and rs16901748. In some embodiments, the at least three polymorphisms comprise: rs56124762, rs1892231, and rs16901748. In some embodiments, the at least three polymorphisms comprise: rs6478109, rs2070558, and rs1892231. In some embodiments, the at least three polymorphisms comprise: rs6478109, rs2070558, and rs16901748. In some embodiments, the at least three polymorphisms comprise: rs6478109, rs1892231, and rs16901748. In some embodiments, the at least three polymorphisms comprise: rs2070558, rs1892231, and rs16901748. In some embodiments, the at least three polymorphisms comprise: rs6478109, rs2070561, and rs1892231. In some embodiments, the at least three polymorphisms comprise: rs6478109, rs2070561, and rs16901748. In some embodiments, the at least three polymorphisms comprise: rs6478109, rs1892231, and rs16901748. In some embodiments, the at least three polymorphisms comprise: rs2070561, rs1892231, and rs16901748. In some embodiments, the at least three polymorphisms comprise: rs6478109, rs7935393, and rs1892231. In some embodiments, the at least three polymorphisms comprise: rs6478109, rs7935393, and rs9806914. In some embodiments, the at least three polymorphisms comprise: rs6478109, rs7935393, and rs7278257. In some embodiments, the at least three polymorphisms comprise: rs6478109, rs7935393, and rs2070557. In some embodiments, the at least three polymorphisms comprise: rs6478109, rs1892231, and rs9806914. In some embodiments, the at least three polymorphisms comprise: rs6478109, rs1892231, and rs7278257. In some embodiments, the at least three polymorphisms comprise: rs6478109, rs1892231, and rs2070557. In some embodiments, the at least three polymorphisms comprise: rs6478109, rs9806914, and rs7278257. In some embodiments, the at least three polymorphisms comprise: rs6478109, rs9806914, and rs2070557. In some embodiments, the at least three polymorphisms comprise: rs6478109, rs7278257, and rs2070557. In some embodiments, the at least three polymorphisms comprise: rs7935393, rs1892231, and rs9806914. In some embodiments, the at least three polymorphisms comprise: rs7935393, rs1892231, and rs7278257. In some embodiments, the at least three polymorphisms comprise: rs7935393, rs1892231, and rs2070557. In some embodiments, the at least three polymorphisms comprise: rs7935393, rs9806914, and rs7278257. In some embodiments, the at least three polymorphisms comprise: rs7935393, rs9806914, and rs2070557. In some embodiments, the at least three polymorphisms comprise: rs7935393, rs7278257, and rs2070557. In some embodiments, the at least three polymorphisms comprise: rs1892231, rs9806914, and rs7278257. In some embodiments, the at least three polymorphisms comprise: rs1892231, rs9806914, and rs2070557. In some embodiments, the at least three polymorphisms comprise: rs1892231, rs7278257, and rs2070557. In some embodiments, the at least three polymorphisms comprise: rs9806914, rs7278257, and rs2070557. In some embodiments, the at least three polymorphisms comprise: rs6478109, rs56124762, and rs1892231. In some embodiments, the at least three polymorphisms further comprises a fourth polymorphism comprising rs16901748, rs1892231, rs56124762, rs6478109, rs2070558, rs2070561, rs11897732, rs6740739, rs17796285, rs7935393, rs12934476, rs12457255, rs2070557, rs4246905, rs10974900, rs12434976, rs2815844, rs889702, rs2409750, rs1541020, rs4942248, rs12934476, rs12457255, rs2297437, rs41309367, rs10733509, rs10750376, rs10932456, rs1326860, rs1528663, rs951279, rs9806914, rs7935393, rs1690492, rs420726, rs7759385, rs10974900, rs1326860, rs2548147, rs2815844, rs889702, rs9806914, rs7278257, or rs11221332, or a proxy polymorphism in linkage disequilibrium therewith as determined with an R2 of at least 0.85, or a combination thereof. In some embodiments, the at least three polymorphisms are detected in the sample by subjecting the sample to an assay configured to detect a presence of at least three nucleotides corresponding to nucleic acid position 501 within at least three of SEQ ID NOS: 2001-20041, or 20057-20059. In some embodiments, the inflammatory, fibrotic, or fibrostenotic disease or condition comprises inflammatory bowel disease, Crohn's disease, obstructive Crohn's disease, ulcerative colitis, intestinal fibrosis, intestinal fibrostenosis, rheumatoid arthritis, pulmonary fibrosis, scleroderma, or primary sclerosing cholangitis. In some embodiments, the Crohn's disease is ileal, ileocolonic, or colonic Crohn's disease. In some embodiments, the pulmonary fibrosis comprises idiopathic pulmonary fibrosis. In some embodiments, the subject has, or is at risk for developing, a non-response or loss-of-response to a standard therapy comprising glucocorticosteriods, anti-TNF therapy, anti-a4-b7 therapy, anti-IL12p40 therapy, or a combination thereof. In some embodiments, the method further comprises determining whether the subject with an inflammatory, a fibrotic, or a fibrostenotic disease or condition is suitable for treatment with an inhibitor of TL1A activity or expression based, at least in part, on the at least three polymorphisms detected in the sample. In some embodiments, the method further comprises obtaining, or having obtained, the sample from the subject. In some embodiments, the at least three polymorphisms are detected in utilizing assay comprising a quantitative polymerase chain reaction (qPCR), nucleic acid sequencing reaction, or a genotyping array. In some embodiments, the at least three polymorphisms comprise three polymorphisms selected from Table 1 (3-SNP models). In some embodiments, the at least three polymorphisms comprise four polymorphisms selected from Table 1 (4-SNP models). In some embodiments, the at least three polymorphisms comprise five polymorphisms selected from Table 1 (5-SNP models). In some embodiments, the at least three polymorphisms comprise six polymorphisms selected from Table 1 (6-SNP models). In some embodiments, the at least three polymorphisms comprise seven polymorphisms selected from Table 1 (7-SNP models). In some embodiments, the at least three polymorphisms comprise eight polymorphisms from one or more 8-SNP models provided in Table 25. In some embodiments, the at least three polymorphisms comprise nine polymorphisms selected from Table 1 (9-SNP models). In some embodiments, the at least three polymorphisms comprise ten polymorphisms selected from Table 1 (10-SNP models).

[0021] In further embodiments, at least three polymorphisms is at least eight polymorphisms. In some embodiments, the at least eight polymorphisms are provided in an 8-SNP model in Table 25.

[0022] Additional aspects and advantages of the present disclosure will become readily apparent to those skilled in this art from the following detailed description, wherein only illustrative embodiments of the present disclosure are shown and described. As will be realized, the present disclosure is capable of other and different embodiments, and its several details are capable of modifications in various obvious respects, all without departing from the disclosure. Accordingly, the drawings and description are to be regarded as illustrative in nature, and not as restrictive.

### INCORPORATION BY REFERENCE

[0023] All publications, patents, and patent applications mentioned in this specification are herein incorporated by reference to the same extent as if each individual publication, patent, or patent application was specifically and individually indicated to be incorporated by reference. To the extent publications and patents or patent applications incorporated by reference contradict the disclosure contained in the specification, the specification is intended to supersede and/or take precedence over any such contradictory material.

### BRIEF DESCRIPTION OF THE DRAWINGS

[0024] The novel features of the inventive concepts set forth with particularity in the appended claims. A better understanding of the features and advantages of the present invention will be obtained by reference to the following detailed description that sets forth illustrative embodiments, in which the principles of the invention are utilized, and the accompanying drawings (also “Figure” and “FIG.” herein), of which:

[0025] FIG. 1 shows a workflow according to an embodiment of the present disclosure for processing a biological sample obtained from a subject to inform the selection of a therapeutic agent to treat a disease or a condition of the subject.

[0026] FIG. 2 shows a computer-implemented workflow according to an embodiment of the present disclosure for generating an electronic report to a user, such as a physician, comprising a TNFSF15 profile of a subject based on an analysis of genotype data from the subject.

[0027] FIG. 3 shows a computer system that is programmed or otherwise configured to implement methods provided herein.

[0028] FIG. 4 shows a computer-implemented workflow according to an embodiment of the present disclosure for producing a TNFSF15 profile.

[0029] FIG. 5A-5C shows a clustering analysis within our the TL1A companion diagnostic (CDx) dataset according to some embodiments herein. FIG. 5A shows cluster 1, FIG. 5B shows cluster 2, and FIG. 5C shows cluster 3, from the TL1A CDx dataset.

[0030] FIG. 6 shows that the 3 clusters from FIG. 5A-5C were collapsed into 2 clusters (high TL1A expression clusters shown on the left) and (low TL1A expression clusters on the right).

[0031] FIGS. 7A-7C show chromatograms for analytical size exclusion chromatography of anti-TL1A antibodies. FIG. 7A shows chromatograms for analytical size exclusion chromatography of antibodies A193, A194, and A195. FIG. 7B shows chromatograms for analytical size exclusion chromatography of antibodies A196, A197, and A198. FIG. 7C shows chromatograms for analytical size exclusion chromatography of antibodies A199, A200, and A201.

[0032] FIG. 8A-8B depict inhibition of interferon gamma in human blood with anti-TL1A antibodies. FIG. 8A depicts inhibition of interferon gamma in human blood with anti-TL1A antibodies A219 and A213. FIG. 8B depicts inhibition of interferon gamma in human blood with anti-TL1A antibody A212.

[0033] FIG. 9A-9C depicts a PLS model demonstrating effect of pH and protein concentration on viscosity. FIG. 9A shows a PLS graph, FIG. 9B shows a model of the predicted viscosity versus anti-TL1A antibody concentration in mg/mL, and FIG. 9C shows a model of the estimated viscosity versus actual viscosity. Viscosity units are in mPa-s.

[0034] FIG. 10 illustrates, according to some embodiments, the TL1A CDx performance statustics against TL1A ex vivo production assay.

[0035] FIGS. 11A-11B show exemplary clinical trial studies of the anti-TL1A antibodies disclosed herein. FIG. 11A depicts the study schema for induction period for the phase 2 clinical trial for A219 in UC in accordance with some embodiments herein. FIG. 11B depicts the study schema for open-label extension period for the phase 2 clinical trial for A219 in UC in accordance with some embodiments herein.

### DETAILED DESCRIPTION

[0036] Provided herein are methods, systems, and kits for treating a subject who may be suitable for treatment with an inhibitor of Tumor Necrosis Factor (Ligand) Superfamily, Member 15 (TL1A) activity or expression, provided the subject is a carrier of a genotype. The subject may be a patient, who may be diagnosed with an inflammatory disease, a fibrostenotic disease, or a fibrotic disease, such as inflammatory bowel disease (IBD) or Crohn's disease (CD). The subject may not be a patient, but may be suspected of having the inflammatory disease, the fibrostenotic disease, or the fibrotic disease. The genotype may, in some cases, be useful for treating the inflammatory fibrostenotic, or fibrotic disease or condition, as mediated by TL1A. The subject, in some embodiments, is treated by administering the inhibitor of TL1A activity or expression (e.g., anti-TL1A antibody) to the subject, provided the genotype is detected. In some cases, identifying the subject as being suitable for treatment with the inhibitor of activity or expression is required in order to administer the inhibitor to the subject.

[0037] Referring to FIG. 1, the methods, systems and kits of the present disclosure involve, in some embodiments, the steps of providing a buccal swab sample from a subject 101, optionally purifying DNA from the sample by processing the sample 102, assaying the optionally processed sample to detect genotypes of at least three genetic loci in the sample 103, processing the genotypes to produce a TNFSF15 profile 104, and treating the subject with an anti-TL1A antibody or antibody fragment as disclosed herein to treat a disease or disorder of the subject based on the TNFSF15 profile 105.

[0038] The genotypes described herein are detected using suitable genotyping devices (e.g., array, sequencing). In some instances, a sample is obtained from the subject or patient indirectly or directly. In some instances, the sample may be obtained by the subject. In other instances, the sample may be obtained by a healthcare professional, such as a nurse or physician. The sample may be derived from virtually any biological fluid or tissue containing genetic information, such as blood.

[0039] The subject disclosed herein can be a mammal, such as for example a mouse, rat, guinea pig, rabbit, non-human primate, or farm animal. In some instances, the subject is human. In some instances, the subject is suffering from a symptom related to a disease or condition disclosed herein (e.g., abdominal pain, cramping, diarrhea, rectal bleeding, fever, weight loss, fatigue, loss of appetite, dehydration, and malnutrition, anemia, or ulcers).

[0040] In some embodiments, the subject is susceptible to, or is inflicted with, thiopurine toxicity, or a disease caused by thiopurine toxicity (such as pancreatitis or leukopenia). The subject may experience, or is suspected of experiencing, non-response or loss-of-response to a standard treatment (e.g., anti-TNF alpha therapy, anti-a4-b7 therapy (vedolizumab), anti-IL12p40 therapy (ustekinumab), Thalidomide, or Cytoxin).

[0041] The disease or condition disclosed herein may be an inflammatory disease, a fibrostenotic disease, or a fibrotic disease. In some instances, the disease or the condition is a TL1A-mediated disease or condition. The term, “TL1A-mediated disease or condition” refers to a disease or a condition pathology or pathogenesis that is driven, at least in part, by TL1A signaling. In some instances, the disease or the condition is immune-mediated disease or condition, such as those mediated by TL1A.

[0042] In some embodiments the disease or the condition is an inflammatory disease or disorder that is mediated, at least in part, by TL1A signaling. Non-limiting examples of inflammatory disease include, allergy, ankylosing spondylitis, asthma, atopic dermatitis, autoimmune diseases or disorders, cancer, celiac disease, chronic obstructive pulmonary disease (COPD), chronic peptic ulcer, cystic fibrosis, diabetes (e.g., type 1 diabetes and type 2 diabetes), glomerulonephritis, gout, hepatitis (e.g., active hepatitis), an immune-mediated disease or disorder, inflammatory bowel disease (IBD) such as Crohn's disease and ulcerative colitis, myositis, osteoarthritis, pelvic inflammatory disease (PID), multiple sclerosis, neurodegenerative diseases of aging, periodontal disease (e.g., periodontitis), preperfusion injury transplant rejection, psoriasis, pulmonary fibrosis (e.g., idiopathic pulmonary fibrosis), rheumatic disease, scleroderma, sinusitis, tuberculosis.

[0043] In some embodiments, the disease or the condition is an autoimmune disease that is mediated, at least in part, by TL1A signaling. Non-limiting examples of autoimmune disease or disorder include Achalasia, Addison's disease, Adult Still's disease, Agammaglobulinemia, Alopecia areata, Amyloidosis, Ankylosing spondylitis, Anti-GBM/Anti-TBM nephritis, Antiphospholipid syndrome, Autoimmune angioedema, Autoimmune dysautonomia, Autoimmune encephalomyelitis, Autoimmune hepatitis, Autoimmune inner ear disease (AIED), Autoimmune myocarditis, Autoimmune oophoritis, Autoimmune orchitis, Autoimmune pancreatitis, Autoimmune retinopathy, Autoimmune urticaria, Axonal & neuronal neuropathy (AMAN), Baló disease, Behcet's disease, Benign mucosal pemphigoid, Bullous pemphigoid, Castleman disease (CD), Celiac disease, Chagas disease, Chronic inflammatory demyelinating polyneuropathy (CIDP), Chronic recurrent multifocal osteomyelitis (CRMO), Churg-Strauss Syndrome (CSS) or Eosinophilic Granulomatosis (EGPA), Cicatricial pemphigoid, Cogan's syndrome, Cold agglutinin disease, Congenital heart block, Coxsackie myocarditis, CREST syndrome, Crohn's disease, Dermatitis herpetiformis, Dermatomyositis, Devic's disease (neuromyelitis optica), Discoid lupus, Dressler's syndrome, Endometriosis, Eosinophilic esophagitis (EoE), Eosinophilic fasciitis, Erythema nodosum, Essential mixed cryoglobulinemia, Evans syndrome, Fibromyalgia, Fibrosing alveolitis, Giant cell arteritis (temporal arteritis), Giant cell myocarditis, Glomerulonephritis, Goodpasture's syndrome, Granulomatosis with Polyangiitis, Graves' disease, Guillain-Barre syndrome, Hashimoto's thyroiditis, Hemolytic anemia, Henoch-Schonlein purpura (HSP), Herpes gestationis or pemphigoid gestationis (PG), Hidradenitis Suppurativa (HS) (Acne Inversa), Hypogammalglobulinemia, IgA Nephropathy, IgG4-related sclerosing disease, Immune thrombocytopenic purpura (ITP), Inclusion body myositis (IBM), Interstitial cystitis (IC), Juvenile arthritis, Juvenile diabetes (Type 1 diabetes), Juvenile myositis (JM), Kawasaki disease, Lambert-Eaton syndrome, Leukocytoclastic vasculitis, Lichen planus, Lichen sclerosus, Ligneous conjunctivitis, Linear IgA disease (LAD), Lupus, Lyme disease chronic, Meniere's disease, Microscopic polyangiitis (MPA), Mixed connective tissue disease (MCTD), Mooren's ulcer, Mucha-Habermann disease, Multifocal MotorNeuropathy (MMN) or MMNCB, Multiple sclerosis, Myasthenia gravis, Myositis, Narcolepsy, Neonatal Lupus, Neuromyelitis optica, Neutropenia, Ocular cicatricial pemphigoid, Optic neuritis, Palindromic rheumatism (PR), PANDAS, Paraneoplastic cerebellar degeneration (PCD), Paroxysmal nocturnal hemoglobinuria (PNH), Parry Romberg syndrome, Pars planitis (peripheral uveitis), Parsonage-Turner syndrome, Pemphigus, Peripheral neuropathy, Perivenous encephalomyelitis, Pernicious anemia (PA), POEMS syndrome, Polyarteritis nodosa, Polyglandular syndromes type I, II, III, Polymyalgia rheumatica, Polymyositis, Postmyocardial infarction syndrome, Postpericardiotomy syndrome, Primary biliary cirrhosis, Primary sclerosing cholangitis, Progesterone dermatitis, Psoriasis, Psoriatic arthritis, Pure red cell aplasia (PRCA), Pyoderma gangrenosum, Raynaud's phenomenon, Reactive Arthritis, Reflex sympathetic dystrophy, Relapsing polychondritis, Restless legs syndrome (RLS), Retroperitoneal fibrosis, Rheumatic fever, Rheumatoid arthritis, Sarcoidosis, Schmidt syndrome, Scleritis, Scleroderma, Sjögren's syndrome, Sperm & testicular autoimmunity, Stiff person syndrome (SPS), Subacute bacterial endocarditis (SBE), Susac's syndrome, Sympathetic ophthalmia (SO), Takayasu's arteritis, Temporal arteritis/Giant cell arteritis, Thrombocytopenic purpura (TTP), Tolosa-Hunt syndrome (THS), Transverse myelitis, Type 1 diabetes, Ulcerative colitis (UC), Undifferentiated connective tissue disease (UCTD), Uveitis, Vasculitis, Vitiligo, and Vogt-Koyanagi-Harada Disease.

[0044] In some embodiments, the disease or the condition is a cancer that is mediated, at least in part, by TL1A signaling. Non-limiting examples of cancers include Adenoid Cystic Carcinoma, Adrenal Gland Cancer, Amyloidosis, Anal Cancer, Ataxia-Telangiectasia, Atypical Mole Syndrome, Basal Cell Carcinoma, Bile Duct Cancer, Birt Hogg Dube Syndrome, Bladder Cancer, Bone Cancer, Brain Tumor, Breast Cancer, Breast Cancer in Men, Carcinoid Tumor, Cervical Cancer, Colorectal Cancer, Ductal Carcinoma, Endometrial Cancer, Esophageal Cancer, Gastric Cancer, Gastrointestinal Stromal Tumor (GIST), HER2-Positive Breast Cancer, Islet Cell Tumor, Juvenile Polyposis Syndrome, Kidney Cancer, Laryngeal Cancer, Leukemia—Acute Lymphoblastic Leukemia, Leukemia—Acute Lymphocytic (ALL), Leukemia—Acute Myeloid AML, Leukemia—Adult, Leukemia—Childhood, Leukemia—Chronic Lymphocytic (CLL), Leukemia—Chronic Myeloid (CIVIL), Liver Cancer, Lobular Carcinoma, Lung Cancer, Lung Cancer—Small Cell (SCLC), Lung Cancer—Non-small Cell (NSCLC), Lymphoma—Hodgkin's, Lymphoma—Non-Hodgkin's, Malignant Glioma, Melanoma, Meningioma, Multiple Myeloma, Myelodysplastic Syndrome (MDS), Nasopharyngeal Cancer, Neuroendocrine Tumor, Oral Cancer, Osteosarcoma, Ovarian Cancer, Pancreatic Cancer, Pancreatic Neuroendocrine Tumors, Parathyroid Cancer, Penile Cancer, Peritoneal Cancer, Peutz-Jeghers Syndrome, Pituitary Gland Tumor, Polycythemia Vera, Prostate Cancer, Renal Cell Carcinoma, Retinoblastoma, Salivary Gland Cancer, Sarcoma, Sarcoma—Kaposi, Skin Cancer, Small Intestine Cancer, Stomach Cancer, Testicular Cancer, Thymoma, Thyroid Cancer, Uterine (Endometrial) Cancer, Vaginal Cancer, and Wilms' Tumor.

[0045] In some embodiments, the disease or the condition is an inflammatory bowel disease, such as Crohn's disease (CD) or ulcerative colitis (UC). A subject may suffer from fibrosis, fibrostenosis, or a fibrotic disease, either isolated or in combination with an inflammatory disease. In some cases, the CD is severe CD. The severe CD may result from inflammation that has led to the formation of scar tissue in the intestinal wall (fibrostenosis) and/or swelling. In some cases, the severe CD is characterized by the presence of fibrotic and/or inflammatory strictures. The strictures may be determined by computed tomography enterography (CTE), and magnetic resonance imaging enterography (MRE). The disease or condition may be characterized as refractory, which in some cases, means the disease is resistant to a standard treatment (e.g., anti-TNFα therapy). Non-limiting examples of standard treatment include glucocorticosteriods, anti-TNF therapy, anti-a4-b7 therapy (vedolizumab), anti-IL12p40 therapy (ustekinumab), Thalidomide, and Cytoxin.

### Genotypes

[0046] Disclosed herein are genotypes that may be detected in a sample obtained from a subject by analyzing the genetic material in the sample. In some instances, the subject may be human. In some embodiments, the genetic material is obtained from a subject having a disease or condition disclosed herein. In some cases, the genetic material is obtained from blood, serum, plasma, sweat, hair, tears, urine, and other techniques known by one of skill in the art. In some cases, the genetic material is obtained from a biopsy, e.g., from the intestinal track of the subject.

[0047] The genotypes of the present disclosure comprise genetic material that is deoxyribonucleic acid (DNA). In some instances, the genotype comprises a denatured DNA molecule or fragment thereof. In some instances, the genotype comprises DNA selected from: genomic DNA, viral DNA, mitochondrial DNA, plasmid DNA, amplified DNA, circular DNA, circulating DNA, cell-free DNA, or exosomal DNA. In some instances, the DNA is single-stranded DNA (ssDNA), double-stranded DNA, denaturing double-stranded DNA, synthetic DNA, and combinations thereof. The circular DNA may be cleaved or fragmented.

[0048] The genotypes disclosed herein comprise at least one polymorphism at a gene or genetic locus described herein. In some instances, the gene or genetic locus is selected from the group consisting of Tumor Necrosis Factor (Ligand) Superfamily, Member 15 (TNFSF15), THADA Armadillo Repeat Containing (THADA), Pleckstrin Homology, MyTH4 And FERM Domain Containing H2 (PLEKHH2), XK Related 6 (XKR6), Myotubularin Related Protein 9 (MTMR9), ETS Proto-Oncogene 1, Transcription Factor (ETS1), C-Type Lectin Domain Containing 16A (CLEC16A), Suppressor Of Cytokine Signaling 1 (SOCS1), Protein Tyrosine Phosphatase Non-Receptor Type 2 (PTPN2), Inducible T Cell Costimulator Ligand (ICOSLG), Janus Kinase 2 (JAK2), Catenin Delta 2 (CTNND2), Regulator Of G Protein Signaling 7 (RGS7), RNA Binding Fox-1 Homolog 1 (RBFOX1), RNA Binding Motif Protein 17 (RBM17), 6-Phosphofructo-2-Kinase/Fructose-2,6-Biphosphatase 3 (PFKFB3), Ecto-NOX Disulfide-Thiol Exchanger 1 (ENOX1), Coiled-Coil Domain Containing 122 (CCDC122), Regulator Of Telomere Elongation Helicase 1 (RTEL1), TNF Receptor Superfamily Member 6b (TNFRSF6B), GLIS Family Zinc Finger 3 (GLIS3), Solute Carrier Family 1 Member 1 (SLC1A1), IKAROS Family Zinc Finger 2 (IKZF2), Fatty Acyl-CoAReductase 1 (FAR1), Spondin 1 (SPON1), Plexin A2 (PLXNA2), MIR205 Host Gene (MIR205HG), C-Type Lectin Domain Containing 16A (CLEC16A), PR/SET Domain 14 (PRDM), Autophagy Related 5 (ATG5), and Prostaglandin E Receptor 4 (PTGER4). In some instances, the gene or genetic locus comprises a gene or genetic locus provided in Table 1. The genotypes disclosed herein are, in some cases, a haplotype. In some instances, the genotype comprises a particular polymorphism, a polymorphism in linkage disequilibrium (LD) therewith, or a combination thereof. In some cases, LD is defined by an r² of at least or about 0.70, 0.75, 0.80, 0.85, 0.90, or 1.0. The genotypes disclosed herein can comprise at least or about 1, 2, 3, 4, 5, 6, 7, 8, 9, 10, 11, 12, 13, 14, 15, 16, 17, 18, 19, 20, 21, 22, 23, 24, 25, 26, 27, 28, 29, 30, or more polymorphisms. In preferred embodiments, the genotypes disclosed herein comprise a combination of 3 polymorphisms, such as those provided in Table 1.

[0049] The polymorphisms described herein can be a single nucleotide polymorphism, or an indel (insertion/deletion). In some instances, the polymorphism is an insertion or a deletion of at least one nucleobase (e.g., an indel). In some instances, the genotype may comprise a copy number variation (CNV), which is a variation in a number of a nucleic acid sequence between individuals in a given population. In some instances, the CNV comprises at least or about two, three, four, five, six, seven, eight, nine, ten, twenty, thirty, forty or fifty nucleic acid molecules. In some instances, the genotype is heterozygous. In some instances, the genotype is homozygous.

[0050] Disclosed herein, in the following embodiments, are genotypes disclosed herein:
[0051] 1. A genotype comprising at least one polymorphism at a gene or genetic locus.
[0052] 2. The genotype of embodiment 1 comprising a polymorphism provided in Table 1.
[0053] 3. The genotype of embodiments 1-2 that is heterozygous.
[0054] 4. The genotype of embodiments 1-2 that is homozygous.
[0055] 5. The genotype of embodiments 1-4, wherein the genotype comprises at least two polymorphisms.
[0056] 6. The genotype of embodiments 1-4, wherein the genotype comprises at least three polymorphisms.
[0057] 7. The genotype of embodiments 1-4, wherein the genotype comprises at least four polymorphisms.
[0058] 8. The genotype of embodiments 1-4, wherein the genotype comprises at least five polymorphisms.
[0059] 9. The genotype of embodiments 1-4, wherein the genotype comprises at least six polymorphisms.
[0060] 10. The genotype of embodiments 1-4, wherein the genotype comprises at least seven polymorphisms.
[0061] 11. The genotype of embodiments 1-4, wherein the genotype comprises at least eight polymorphisms.
[0062] 12. The genotype of embodiment 1, comprising a polymorphism in linkage disequilibrium with a polymorphism provided in Table 1.
[0063] 13. The genotype of embodiment 12, wherein LD is defined by (i) a D′ value of at least about 0.70, or (ii) a D′ value of 0 and an r² value of at least about 0.70.
[0064] 14. The genotype of embodiment 12, wherein LD is defined by (i) a D′ value of at least about 0.80, or (ii) a D′ value of 0 and an r² value of at least about 0.80.
[0065] 15. The genotype of embodiment 12, wherein LD is defined by (i) a D′ value of at least about 0.90, or (ii) a D′ value of 0 and an r² value of at least about 0.90.
[0066] 16. The genotype of embodiment 12, wherein LD is defined by (i) a D′ value of at least about 0.95, or (ii) a D′ value of 0 and an r² value of at least about 0.95.
[0067] 17. The genotype of embodiments 1-16, wherein the gene or genetic locus is selected from the group consisting of Tumor Necrosis Factor (Ligand) Superfamily, Member 15 (TNFSF15), THADA Armadillo Repeat Containing (THADA), Pleckstrin Homology, MyTH4 And FERM Domain Containing H2 (PLEKHH2), XK Related 6 (XKR6), Myotubularin Related Protein 9 (MTMR9), ETS Proto-Oncogene 1, Transcription Factor (ETS1), C-Type Lectin Domain Containing 16A (CLEC16A), Suppressor Of Cytokine Signaling 1 (SOCS1), Protein Tyrosine Phosphatase Non-Receptor Type 2 (PTPN2), Inducible T Cell Costimulator Ligand (ICOSLG), Janus Kinase 2 (JAK2), Catenin Delta 2 (CTNND2), Regulator Of G Protein Signaling 7 (RGS7), RNA Binding Fox-1 Homolog 1 (RBFOX1), RNA Binding Motif Protein 17 (RBM17), 6-Phosphofructo-2-Kinase/Fructose-2,6-Biphosphatase 3 (PFKFB3), Ecto-NOX Disulfide-Thiol Exchanger 1 (ENOX1), Coiled-Coil Domain Containing 122 (CCDC122), Regulator Of Telomere Elongation Helicase 1 (RTEL1), TNF Receptor Superfamily Member 6b (TNFRSF6B), GLIS Family Zinc Finger 3 (GLIS3), Solute Carrier Family 1 Member 1 (SLC1A1), IKAROS Family Zinc Finger 2 (IKZF2), Fatty Acyl-CoAReductase 1 (FAR1), Spondin 1 (SPON1), Plexin A2 (PLXNA2), MIR205 Host Gene (MIR205HG), C-Type Lectin Domain Containing 16A (CLEC16A), PR/SET Domain 14 (PRDM), Autophagy Related 5 (ATG5), and Prostaglandin E Receptor 4 (PTGER4).
[0068] 18. The genotype of embodiments 5-6, wherein the genotype comprises at least two polymorphisms selected from:
   [0069] (1) rs16901748, rs7759385, rs4246905;
   [0070] (2) rs16901748, rs7759385, rs7935393;
   [0071] (3) rs16901748, rs7759385, rs1892231;
   [0072] (4) rs16901748, rs7759385, rs12934476;
   [0073] (5) rs16901748, rs7759385, rs9806914;
   [0074] (6) rs16901748, rs7759385, rs2297437;
   [0075] (7) rs16901748, rs7759385, rs2070557;
   [0076] (8) rs16901748, rs7759385, rs7278257;
   [0077] (9) rs16901748, rs7759385, rs11221332;
   [0078] (10) rs16901748, rs7759385, rs41309367;
   [0079] (11) rs16901748, rs7759385, rs6478109;
   [0080] (12) rs16901748, rs4246905, rs7935393;
   [0081] (13) rs16901748, rs4246905, rs1892231;
   [0082] (14) rs16901748, rs4246905, rs12934476;
   [0083] (15) rs16901748, rs4246905, rs9806914;
   [0084] (16) rs16901748, rs4246905, rs2297437;
   [0085] (17) rs16901748, rs4246905, rs2070557;
   [0086] (18) rs16901748, rs4246905, rs7278257;
   [0087] (19) rs16901748, rs4246905, rs11221332;
   [0088] (20) rs16901748, rs4246905, rs41309367;
   [0089] (21) rs16901748, rs4246905, rs6478109;
   [0090] (22) rs16901748, rs7935393, rs1892231;
   [0091] (23) rs16901748, rs7935393, rs12934476;
   [0092] (24) rs16901748, rs7935393, rs9806914;
   [0093] (25) rs16901748, rs7935393, rs2297437;
   [0094] (26) rs16901748, rs7935393, rs2070557;
   [0095] (27) rs16901748, rs7935393, rs7278257;
   [0096] (28) rs16901748, rs7935393, rs11221332;
   [0097] (29) rs16901748, rs7935393, rs41309367;
   [0098] (30) rs16901748, rs7935393, rs6478109;
   [0099] (31) rs16901748, rs1892231, rs12934476;
   [0100] (32) rs16901748, rs1892231, rs9806914;
   [0101] (33) rs16901748, rs1892231, rs2297437;
   [0102] (34) rs16901748, rs1892231, rs2070557;
   [0103] (35) rs16901748, rs1892231, rs7278257;
   [0104] (36) rs16901748, rs1892231, rs11221332;
   [0105] (37) rs16901748, rs1892231, rs41309367;
   [0106] (38) rs16901748, rs1892231, rs6478109;
   [0107] (39) rs16901748, rs12934476, rs9806914;
   [0108] (40) rs16901748, rs12934476, rs2297437;
   [0109] (41) rs16901748, rs12934476, rs2070557;
   [0110] (42) rs16901748, rs12934476, rs7278257;
   [0111] (43) rs16901748, rs12934476, rs11221332;
   [0112] (44) rs16901748, rs12934476, rs41309367;
   [0113] (45) rs16901748, rs12934476, rs6478109;
   [0114] (46) rs16901748, rs9806914, rs2297437;
   [0115] (47) rs16901748, rs9806914, rs2070557;
   [0116] (48) rs16901748, rs9806914, rs7278257;
   [0117] (49) rs16901748, rs9806914, rs11221332;
   [0118] (50) rs16901748, rs9806914, rs41309367;
   [0119] (51) rs16901748, rs9806914, rs6478109;
   [0120] (52) rs16901748, rs2297437, rs2070557;
   [0121] (53) rs16901748, rs2297437, rs7278257;
   [0122] (54) rs16901748, rs2297437, rs11221332;
   [0123] (55) rs16901748, rs2297437, rs41309367;
   [0124] (56) rs16901748, rs2297437, rs6478109;
   [0125] (57) rs16901748, rs2070557, rs7278257;
   [0126] (58) rs16901748, rs2070557, rs11221332;
   [0127] (59) rs16901748, rs2070557, rs41309367;
   [0128] (60) rs16901748, rs2070557, rs6478109;
   [0129] (61) rs16901748, rs7278257, rs11221332;
   [0130] (62) rs16901748, rs7278257, rs41309367;
   [0131] (63) rs16901748, rs7278257, rs6478109;
   [0132] (64) rs16901748, rs11221332, rs41309367;
   [0133] (65) rs16901748, rs11221332, rs6478109;
   [0134] (66) rs16901748, rs41309367, rs6478109;
   [0135] (67) rs7759385, rs4246905, rs7935393;
   [0136] (68) rs7759385, rs4246905, rs1892231;
   [0137] (69) rs7759385, rs4246905, rs12934476;
   [0138] (70) rs7759385, rs4246905, rs9806914;
   [0139] (71) rs7759385, rs4246905, rs2297437;
   [0140] (72) rs7759385, rs4246905, rs2070557;
   [0141] (73) rs7759385, rs4246905, rs7278257;
   [0142] (74) rs7759385, rs4246905, rs11221332;
   [0143] (75) rs7759385, rs4246905, rs41309367;
   [0144] (76) rs7759385, rs4246905, rs6478109;
   [0145] (77) rs7759385, rs7935393, rs1892231;
   [0146] (78) rs7759385, rs7935393, rs12934476;
   [0147] (79) rs7759385, rs7935393, rs9806914;
   [0148] (80) rs7759385, rs7935393, rs2297437;
   [0149] (81) rs7759385, rs7935393, rs2070557;
   [0150] (82) rs7759385, rs7935393, rs7278257;
   [0151] (83) rs7759385, rs7935393, rs11221332;
   [0152] (84) rs7759385, rs7935393, rs41309367;
   [0153] (85) rs7759385, rs7935393, rs6478109;
   [0154] (86) rs7759385, rs1892231, rs12934476;
   [0155] (87) rs7759385, rs1892231, rs9806914;
   [0156] (88) rs7759385, rs1892231, rs2297437;
   [0157] (89) rs7759385, rs1892231, rs2070557;
   [0158] (90) rs7759385, rs1892231, rs7278257;
   [0159] (91) rs7759385, rs1892231, rs11221332;
   [0160] (92) rs7759385, rs1892231, rs41309367;
   [0161] (93) rs7759385, rs1892231, rs6478109;
   [0162] (94) rs7759385, rs12934476, rs9806914;
   [0163] (95) rs7759385, rs12934476, rs2297437;
   [0164] (96) rs7759385, rs12934476, rs2070557;
   [0165] (97) rs7759385, rs12934476, rs7278257;
   [0166] (98) rs7759385, rs12934476, rs11221332;
   [0167] (99) rs7759385, rs12934476, rs41309367;
   [0168] (100) rs7759385, rs12934476, rs6478109;
   [0169] (101) rs7759385, rs9806914, rs2297437;
   [0170] (102) rs7759385, rs9806914, rs2070557;
   [0171] (103) rs7759385, rs9806914, rs7278257;
   [0172] (104) rs7759385, rs9806914, rs11221332;
   [0173] (105) rs7759385, rs9806914, rs41309367;
   [0174] (106) rs7759385, rs9806914, rs6478109;
   [0175] (107) rs7759385, rs2297437, rs2070557;
   [0176] (108) rs7759385, rs2297437, rs7278257;
   [0177] (109) rs7759385, rs2297437, rs11221332;
   [0178] (110) rs7759385, rs2297437, rs41309367;
   [0179] (111) rs7759385, rs2297437, rs6478109;
   [0180] (112) rs7759385, rs2070557, rs7278257;
   [0181] (113) rs7759385, rs2070557, rs11221332;
   [0182] (114) rs7759385, rs2070557, rs41309367;
   [0183] (115) rs7759385, rs2070557, rs6478109;
   [0184] (116) rs7759385, rs7278257, rs11221332;
   [0185] (117) rs7759385, rs7278257, rs41309367;
   [0186] (118) rs7759385, rs7278257, rs6478109;
   [0187] (119) rs7759385, rs11221332, rs41309367;
   [0188] (120) rs7759385, rs11221332, rs6478109;
   [0189] (121) rs7759385, rs41309367, rs6478109;
   [0190] (122) rs4246905, rs7935393, rs1892231;
   [0191] (123) rs4246905, rs7935393, rs12934476;
   [0192] (124) rs4246905, rs7935393, rs9806914;
   [0193] (125) rs4246905, rs7935393, rs2297437;
   [0194] (126) rs4246905, rs7935393, rs2070557;
   [0195] (127) rs4246905, rs7935393, rs7278257;
   [0196] (128) rs4246905, rs7935393, rs11221332;
   [0197] (129) rs4246905, rs7935393, rs41309367;
   [0198] (130) rs4246905, rs7935393, rs6478109;
   [0199] (131) rs4246905, rs1892231, rs12934476;
   [0200] (132) rs4246905, rs1892231, rs9806914;
   [0201] (133) rs4246905, rs1892231, rs2297437;
   [0202] (134) rs4246905, rs1892231, rs2070557;
   [0203] (135) rs4246905, rs1892231, rs7278257;
   [0204] (136) rs4246905, rs1892231, rs11221332;
   [0205] (137) rs4246905, rs1892231, rs41309367;
   [0206] (138) rs4246905, rs1892231, rs6478109;
   [0207] (139) rs4246905, rs12934476, rs9806914;
   [0208] (140) rs4246905, rs12934476, rs2297437;
   [0209] (141) rs4246905, rs12934476, rs2070557;
   [0210] (142) rs4246905, rs12934476, rs7278257;
   [0211] (143) rs4246905, rs12934476, rs11221332;
   [0212] (144) rs4246905, rs12934476, rs41309367;
   [0213] (145) rs4246905, rs12934476, rs6478109;
   [0214] (146) rs4246905, rs9806914, rs2297437;
   [0215] (147) rs4246905, rs9806914, rs2070557;
   [0216] (148) rs4246905, rs9806914, rs7278257;
   [0217] (149) rs4246905, rs9806914, rs11221332;
   [0218] (150) rs4246905, rs9806914, rs41309367;
   [0219] (151) rs4246905, rs9806914, rs6478109;
   [0220] (152) rs4246905, rs2297437, rs2070557;
   [0221] (153) rs4246905, rs2297437, rs7278257;
   [0222] (154) rs4246905, rs2297437, rs11221332;
   [0223] (155) rs4246905, rs2297437, rs41309367;
   [0224] (156) rs4246905, rs2297437, rs6478109;
   [0225] (157) rs4246905, rs2070557, rs7278257;
   [0226] (158) rs4246905, rs2070557, rs11221332;
   [0227] (159) rs4246905, rs2070557, rs41309367;
   [0228] (160) rs4246905, rs2070557, rs6478109;
   [0229] (161) rs4246905, rs7278257, rs11221332;
   [0230] (162) rs4246905, rs7278257, rs41309367;
   [0231] (163) rs4246905, rs7278257, rs6478109;
   [0232] (164) rs4246905, rs11221332, rs41309367;
   [0233] (165) rs4246905, rs11221332, rs6478109;
   [0234] (166) rs4246905, rs41309367, rs6478109;
   [0235] (167) rs7935393, rs1892231, rs12934476;
   [0236] (168) rs7935393, rs1892231, rs9806914;
   [0237] (169) rs7935393, rs1892231, rs2297437;
   [0238] (170) rs7935393, rs1892231, rs2070557;
   [0239] (171) rs7935393, rs1892231, rs7278257;
   [0240] (172) rs7935393, rs1892231, rs11221332;
   [0241] (173) rs7935393, rs1892231, rs41309367;
   [0242] (174) rs7935393, rs1892231, rs6478109;
   [0243] (175) rs7935393, rs12934476, rs9806914;
   [0244] (176) rs7935393, rs12934476, rs2297437;
   [0245] (177) rs7935393, rs12934476, rs2070557;
   [0246] (178) rs7935393, rs12934476, rs7278257;
   [0247] (179) rs7935393, rs12934476, rs11221332;
   [0248] (180) rs7935393, rs12934476, rs41309367;
   [0249] (181) rs7935393, rs12934476, rs6478109;
   [0250] (182) rs7935393, rs9806914, rs2297437;
   [0251] (183) rs7935393, rs9806914, rs2070557;
   [0252] (184) rs7935393, rs9806914, rs7278257;
   [0253] (185) rs7935393, rs9806914, rs11221332;
   [0254] (186) rs7935393, rs9806914, rs41309367;
   [0255] (187) rs7935393, rs9806914, rs6478109;
   [0256] (188) rs7935393, rs2297437, rs2070557;
   [0257] (189) rs7935393, rs2297437, rs7278257;
   [0258] (190) rs7935393, rs2297437, rs11221332;
   [0259] (191) rs7935393, rs2297437, rs41309367;
   [0260] (192) rs7935393, rs2297437, rs6478109;
   [0261] (193) rs7935393, rs2070557, rs7278257;
   [0262] (194) rs7935393, rs2070557, rs11221332;
   [0263] (195) rs7935393, rs2070557, rs41309367;
   [0264] (196) rs7935393, rs2070557, rs6478109;
   [0265] (197) rs7935393, rs7278257, rs11221332;
   [0266] (198) rs7935393, rs7278257, rs41309367;
   [0267] (199) rs7935393, rs7278257, rs6478109;
   [0268] (200) rs7935393, rs11221332, rs4130936;7
   [0269] (201) rs7935393, rs11221332, rs6478109;
   [0270] (202) rs7935393, rs41309367, rs6478109;
   [0271] (203) rs1892231, rs12934476, rs9806914;
   [0272] (204) rs1892231, rs12934476, rs2297437;
   [0273] (205) rs1892231, rs12934476, rs2070557;
   [0274] (206) rs1892231, rs12934476, rs7278257;
   [0275] (207) rs1892231, rs12934476, rs11221332;
   [0276] (208) rs1892231, rs12934476, rs41309367;
   [0277] (209) rs1892231, rs12934476, rs6478109;
   [0278] (210) rs1892231, rs9806914, rs2297437;
   [0279] (211) rs1892231, rs9806914, rs2070557;
   [0280] (212) rs1892231, rs9806914, rs7278257;
   [0281] (213) rs1892231, rs9806914, rs11221332;
   [0282] (214) rs1892231, rs9806914, rs41309367;
   [0283] (215) rs1892231, rs9806914, rs6478109;
   [0284] (216) rs1892231, rs2297437, rs2070557;
   [0285] (217) rs1892231, rs2297437, rs7278257;
   [0286] (218) rs1892231, rs2297437, rs11221332;
   [0287] (219) rs1892231, rs2297437, rs41309367;
   [0288] (220) rs1892231, rs2297437, rs6478109;
   [0289] (221) rs1892231, rs2070557, rs7278257;
   [0290] (222) rs1892231, rs2070557, rs11221332;
   [0291] (223) rs1892231, rs2070557, rs41309367;
   [0292] (224) rs1892231, rs2070557, rs6478109;
   [0293] (225) rs1892231, rs7278257, rs11221332;
   [0294] (226) rs1892231, rs7278257, rs41309367;
   [0295] (227) rs1892231, rs7278257, rs6478109;
   [0296] (228) rs1892231, rs11221332, rs41309367;
   [0297] (229) rs1892231, rs11221332, rs6478109;
   [0298] (230) rs1892231, rs41309367, rs6478109;
   [0299] (231) rs12934476, rs9806914, rs2297437;
   [0300] (232) rs12934476, rs9806914, rs2070557;
   [0301] (233) rs12934476, rs9806914, rs7278257;
   [0302] (234) rs12934476, rs9806914, rs11221332;
   [0303] (235) rs12934476, rs9806914, rs41309367;
   [0304] (236) rs12934476, rs9806914, rs6478109;
   [0305] (237) rs12934476, rs2297437, rs2070557;
   [0306] (238) rs12934476, rs2297437, rs7278257;
   [0307] (239) rs12934476, rs2297437, rs11221332;
   [0308] (240) rs12934476, rs2297437, rs41309367;
   [0309] (241) rs12934476, rs2297437, rs6478109;
   [0310] (242) rs12934476, rs2070557, rs7278257;
   [0311] (243) rs12934476, rs2070557, rs11221332;
   [0312] (244) rs12934476, rs2070557, rs41309367;
   [0313] (245) rs12934476, rs2070557, rs6478109;
   [0314] (246) rs12934476, rs7278257, rs11221332;
   [0315] (247) rs12934476, rs7278257, rs41309367;
   [0316] (248) rs12934476, rs7278257, rs6478109;
   [0317] (249) rs12934476, rs11221332, rs41309367;
   [0318] (250) rs12934476, rs11221332, rs6478109;
   [0319] (251) rs12934476, rs41309367, rs6478109;
   [0320] (252) rs9806914, rs2297437, rs2070557;
   [0321] (253) rs9806914, rs2297437, rs7278257;
   [0322] (254) rs9806914, rs2297437, rs11221332;
   [0323] (255) rs9806914, rs2297437, rs41309367;
   [0324] (256) rs9806914, rs2297437, rs6478109;
   [0325] (257) rs9806914, rs2070557, rs7278257;
   [0326] (258) rs9806914, rs2070557, rs11221332;
   [0327] (259) rs9806914, rs2070557, rs41309367;
   [0328] (260) rs9806914, rs2070557, rs6478109;
   [0329] (261) rs9806914, rs7278257, rs11221332;
   [0330] (262) rs9806914, rs7278257, rs41309367;
   [0331] (263) rs9806914, rs7278257, rs6478109;
   [0332] (264) rs9806914, rs11221332, rs41309367;
   [0333] (265) rs9806914, rs11221332, rs6478109;
   [0334] (266) rs9806914, rs41309367, rs6478109;
   [0335] (267) rs2297437, rs2070557, rs7278257;
   [0336] (268) rs2297437, rs2070557, rs11221332;
   [0337] (269) rs2297437, rs2070557, rs41309367;
   [0338] (270) rs2297437, rs2070557, rs6478109;
   [0339] (271) rs2297437, rs7278257, rs11221332;
   [0340] (272) rs2297437, rs7278257, rs41309367;
   [0341] (273) rs2297437, rs7278257, rs6478109;
   [0342] (274) rs2297437, rs11221332, rs41309367;
   [0343] (275) rs2297437, rs11221332, rs6478109;
   [0344] (276) rs2297437, rs41309367, rs6478109;
   [0345] (277) rs2070557, rs7278257, rs11221332;
   [0346] (278) rs2070557, rs7278257, rs41309367;
   [0347] (279) rs2070557, rs7278257, rs6478109;
   [0348] (280) rs2070557, rs11221332, rs41309367;
   [0349] (281) rs2070557, rs11221332, rs6478109;
   [0350] (282) rs2070557, rs41309367, rs6478109;
   [0351] (283) rs7278257, rs11221332, rs41309367;
   [0352] (284) rs7278257, rs11221332, rs6478109;
   [0353] (285) rs7278257, rs41309367, rs6478109; or
   [0354] (286) rs11221332, rs41309367, rs6478109.
[0355] 19. The genotype of embodiment 18, wherein the rs7278257 is replaced with rs56124762.
[0356] 20. The genotype of embodiment 18, wherein the rs7278257 is replaced with rs2070558.
[0357] 21. The genotype of embodiment 18, wherein the rs7278257 is replaced with rs2070561.
[0358] 22. The genotype of embodiments 5-6, wherein the genotype comprises at least two polymorphisms selected from imm_9_116608587, imm_11_127948309, and rs1892231.
[0359] 23. The genotype of embodiments 5-6, wherein the genotype comprises at least two polymorphisms selected from imm_9_116608587, imm_11_127948309, and rs9806914.
[0360] 24. The genotype of embodiments 5-6, wherein the genotype comprises at least two polymorphisms selected from imm_9_116608587, imm_11_127948309, and imm_21_44478192.
[0361] 25. The genotype of embodiments 5-6, wherein the genotype comprises at least two polymorphisms selected from imm_9_116608587, imm_11_127948309, and imm_21_44479552.
[0362] 26. The genotype of embodiments 5-6, wherein the genotype comprises at least two polymorphisms selected from imm_9_116608587, rs1892231, and rs9806914.
[0363] 27. The genotype of embodiments 5-6, wherein the genotype comprises at least two polymorphisms selected from imm_9_116608587, rs1892231, and imm_21_44478192.
[0364] 28. The genotype of embodiments 5-6, wherein the genotype comprises at least two polymorphisms selected from imm_9_116608587, rs1892231, and imm_21_44479552.
[0365] 29. The genotype of embodiments 5-6, wherein the genotype comprises at least two polymorphisms selected from imm_9_116608587, rs9806914, and imm_21_44478192.
[0366] 30. The genotype of embodiments 5-6, wherein the genotype comprises at least two polymorphisms selected from imm_9_116608587, rs9806914, and imm_21_44479552.
[0367] 31. The genotype of embodiments 5-6, wherein the genotype comprises at least two polymorphisms selected from imm_9_116608587, imm_21_44478192, and imm_21_44479552.
[0368] 32. The genotype of embodiments 5-6, wherein the genotype comprises at least two polymorphismsselected from imm_11_127948309, rs1892231, and rs9806914.
[0369] 33. The genotype of embodiments 5-6, wherein the genotype comprises at least two polymorphismsselected from imm_11_127948309, rs1892231, and imm_21_44478192.
[0370] 34. The genotype of embodiments 5-6, wherein the genotype comprises at least two polymorphisms selected from imm_11_127948309, rs1892231, and imm_21_44479552.
[0371] 35. The genotype of embodiments 5-6, wherein the genotype comprises at least two polymorphisms selected from imm_11_127948309, rs9806914, and imm_21_44478192.
[0372] 36. The genotype of embodiments 5-6, wherein the genotype comprises at least two polymorphisms selected from imm_11_127948309, rs9806914, and imm_21_44479552.
[0373] 37. The genotype of embodiments 5-6, wherein the genotype comprises at least two polymorphisms selected from imm_11_127948309, imm_21_44478192, and imm_21_44479552.
[0374] 38. The genotype of embodiments 5-6, wherein the genotype comprises at least two polymorphisms selected from rs1892231, rs9806914, and imm_21_44478192.
[0375] 39. The genotype of embodiments 5-6, wherein the genotype comprises at least two polymorphisms selected from rs1892231, rs9806914, and imm_21_44479552.
[0376] 40. The genotype of embodiments 5-6, wherein the genotype comprises at least two polymorphisms selected from rs1892231, imm_21_44478192, and imm_21_44479552.
[0377] 41. The genotype of embodiments 5-6, wherein the genotype comprises at least two polymorphisms selected from rs9806914, imm_21_44478192, and imm_21_44479552.
[0378] 42. The genotype of embodiments 5-6, wherein the genotype comprises at least two polymorphisms selected from rs6478109, rs56124762, and rs1892231.
[0379] 43. The genotype of embodiments 5-6, wherein the genotype comprises at least two polymorphisms selected from rs6478109, rs56124762, and rs16901748.
[0380] 44. The genotype of embodiments 5-6, wherein the genotype comprises at least two polymorphisms selected from rs6478109, rs1892231, and rs16901748.
[0381] 45. The genotype of embodiments 5-6, wherein the genotype comprises at least two polymorphisms selected from rs56124762, rs1892231, and rs16901748.
[0382] 46. The genotype of embodiments 5-6, wherein the genotype comprises at least two polymorphisms selected from rs6478109, rs2070558, and rs1892231.
[0383] 47. The genotype of embodiments 5-6, wherein the genotype comprises at least two polymorphisms selected from rs6478109, rs2070558, and rs16901748.
[0384] 48. The genotype of embodiments 5-6, wherein the genotype comprises at least two polymorphisms selected from rs6478109, rs1892231, and rs16901748.
[0385] 49. The genotype of embodiments 5-6, wherein the genotype comprises at least two polymorphisms selected from rs2070558, rs1892231, and rs16901748.
[0386] 50. The genotype of embodiments 5-6, wherein the genotype comprises at least two polymorphisms selected from rs6478109, rs2070561, and rs1892231.
[0387] 51. The genotype of embodiments 5-6, wherein the genotype comprises at least two polymorphisms selected from rs6478109, rs2070561, and rs16901748.
[0388] 52. The genotype of embodiments 5-6, wherein the genotype comprises at least two polymorphisms selected from rs6478109, rs1892231, and rs16901748.
[0389] 53. The genotype of embodiments 5-6, wherein the genotype comprises at least two polymorphisms selected from rs2070561, rs1892231, and rs16901748.
[0390] 54. The genotype of embodiment 11, wherein the genotype comprises eight polymorphisms selected from:
   [0391] (1) rs6478109, rs56124762, rs1892231, rs16901748, rs12934476, rs7935393, rs98069 14, rs2297437
   [0392] (2) rs6478109, rs56124762, rs1892231, rs16901748, rs12934476, rs7935393, rs98069 14, rs1326860
   [0393] (3) rs6478109, rs56124762, rs1892231, rs16901748, rs12934476, rs7935393, rs98069 14, rs12457255
   [0394] (4) rs6478109, rs56124762, rs1892231, rs16901748, rs12934476, rs7935393, rs98069 14, rs2815844
   [0395] (5) rs6478109, rs56124762, rs1892231, rs16901748, rs12934476, rs7935393, rs98069 14, rs10974900
   [0396] (6) rs6478109, rs56124762, rs1892231, rs16901748, rs12934476, rs7935393, rs98069 14, rs2409750
   [0397] (7) rs6478109, rs56124762, rs1892231, rs16901748, rs12934476, rs7935393, rs98069 14, rs1541020
   [0398] (8) rs6478109, rs56124762, rs1892231, rs16901748, rs12934476, rs7935393, rs98069 14, rs4942248
   [0399] (9) rs6478109, rs56124762, rs1892231, rs16901748, rs12934476, rs7935393, rs98069 14, rs7759385
   [0400] (10) rs6478109, rs56124762, rs1892231, rs16901748, rs12934476, rs7935393, rs2297437, rs1326860
   [0401] (11) rs6478109, rs56124762, rs1892231, rs16901748, rs12934476, rs7935393, rs2297437, rs12457255
   [0402] (12) rs6478109, rs56124762, rs1892231, rs16901748, rs12934476, rs7935393, rs2297437, rs2815844
   [0403] (13) rs6478109, rs56124762, rs1892231, rs16901748, rs12934476, rs7935393, rs2297437, rs10974900
   [0404] (14) rs6478109, rs56124762, rs1892231, rs16901748, rs12934476, rs7935393, rs2297437, rs2409750
   [0405] (15) rs6478109, rs56124762, rs1892231, rs16901748, rs12934476, rs7935393, rs2297437, rs1541020
   [0406] (16) rs6478109, rs56124762, rs1892231, rs16901748, rs12934476, rs7935393, rs2297437, rs4942248
   [0407] (17) rs6478109, rs56124762, rs1892231, rs16901748, rs12934476, rs7935393, rs2297437, rs7759385
   [0408] (18) rs6478109, rs56124762, rs1892231, rs16901748, rs12934476, rs7935393, rs1326860, rs12457255
   [0409] (19) rs6478109, rs56124762, rs1892231, rs16901748, rs12934476, rs7935393, rs1326860, rs2815844
   [0410] (20) rs6478109, rs56124762, rs1892231, rs16901748, rs12934476, rs7935393, rs1326860, rs10974900
   [0411] (21) rs6478109, rs56124762, rs1892231, rs16901748, rs12934476, rs7935393, rs1326860, rs2409750
   [0412] (22) rs6478109, rs56124762, rs1892231, rs16901748, rs12934476, rs7935393, rs1326860, rs1541020
   [0413] (23) rs6478109, rs56124762, rs1892231, rs16901748, rs12934476, rs7935393, rs1326860, rs4942248
   [0414] (24) rs6478109, rs56124762, rs1892231, rs16901748, rs12934476, rs7935393, rs1326860, rs7759385
   [0415] (25) rs6478109, rs56124762, rs1892231, rs16901748, rs12934476, rs7935393, rs12457255, rs2815844
   [0416] (26) rs6478109, rs56124762, rs1892231, rs16901748, rs12934476, rs7935393, rs12457255, rs10974900
   [0417] (27) rs6478109, rs56124762, rs1892231, rs16901748, rs12934476, rs7935393, rs12457255, rs2409750
   [0418] (28) rs6478109, rs56124762, rs1892231, rs16901748, rs12934476, rs7935393, rs12457255, rs1541020
   [0419] (29) rs6478109, rs56124762, rs1892231, rs16901748, rs12934476, rs7935393, rs12457255, rs4942248
   [0420] (30) rs6478109, rs56124762, rs1892231, rs16901748, rs12934476, rs7935393, rs12457255, rs7759385
   [0421] (31) rs6478109, rs56124762, rs1892231, rs16901748, rs12934476, rs7935393, rs2815844, rs10974900
   [0422] (32) rs6478109, rs56124762, rs1892231, rs16901748, rs12934476, rs7935393, rs2815844, rs2409750
   [0423] (33) rs6478109, rs56124762, rs1892231, rs16901748, rs12934476, rs7935393, rs2815844, rs1541020
   [0424] (34) rs6478109, rs56124762, rs1892231, rs16901748, rs12934476, rs7935393, rs2815844, rs4942248
   [0425] (35) rs6478109, rs56124762, rs1892231, rs16901748, rs12934476, rs7935393, rs2815844, rs7759385
   [0426] (36) rs6478109, rs56124762, rs1892231, rs16901748, rs12934476, rs7935393, rs10974900, rs2409750
   [0427] (37) rs6478109, rs56124762, rs1892231, rs16901748, rs12934476, rs7935393, rs10974900, rs1541020
   [0428] (38) rs6478109, rs56124762, rs1892231, rs16901748, rs12934476, rs7935393, rs10974900, rs4942248
   [0429] (39) rs6478109, rs56124762, rs1892231, rs16901748, rs12934476, rs7935393, rs10974900, rs7759385
   [0430] (40) rs6478109, rs56124762, rs1892231, rs16901748, rs12934476, rs7935393, rs2409750, rs1541020
   [0431] (41) rs6478109, rs56124762, rs1892231, rs16901748, rs12934476, rs7935393, rs2409750, rs4942248
   [0432] (42) rs6478109, rs56124762, rs1892231, rs16901748, rs12934476, rs7935393, rs2409750, rs7759385
   [0433] (43) rs6478109, rs56124762, rs1892231, rs16901748, rs12934476, rs7935393, rs1541020, rs4942248
   [0434] (44) rs6478109, rs56124762, rs1892231, rs16901748, rs12934476, rs7935393, rs1541020, rs7759385
   [0435] (45) rs6478109, rs56124762, rs1892231, rs16901748, rs12934476, rs7935393, rs4942248, rs7759385
   [0436] (46) rs6478109, rs56124762, rs1892231, rs16901748, rs12934476, rs9806914, rs2297437, rs1326860
   [0437] (47) rs6478109, rs56124762, rs1892231, rs16901748, rs12934476, rs9806914, rs2297437, rs12457255
   [0438] (48) rs6478109, rs56124762, rs1892231, rs16901748, rs12934476, rs9806914, rs2297437, rs2815844
   [0439] (49) rs6478109, rs56124762, rs1892231, rs16901748, rs12934476, rs9806914, rs2297437, rs10974900
   [0440] (50) rs6478109, rs56124762, rs1892231, rs16901748, rs12934476, rs9806914, rs2297437, rs2409750
   [0441] (51) rs6478109, rs56124762, rs1892231, rs16901748, rs12934476, rs9806914, rs2297437, rs1541020
   [0442] (52) rs6478109, rs56124762, rs1892231, rs16901748, rs12934476, rs9806914, rs2297437, rs4942248
   [0443] (53) rs6478109, rs56124762, rs1892231, rs16901748, rs12934476, rs9806914, rs2297437, rs7759385
   [0444] (54) rs6478109, rs56124762, rs1892231, rs16901748, rs12934476, rs9806914, rs1326860, rs12457255
   [0445] (55) rs6478109, rs56124762, rs1892231, rs16901748, rs12934476, rs9806914, rs1326860, rs2815844
   [0446] (56) rs6478109, rs56124762, rs1892231, rs16901748, rs12934476, rs9806914, rs1326860, rs10974900
   [0447] (57) rs6478109, rs56124762, rs1892231, rs16901748, rs12934476, rs9806914, rs1326860, rs2409750
   [0448] (58) rs6478109, rs56124762, rs1892231, rs16901748, rs12934476, rs9806914, rs1326860, rs1541020
   [0449] (59) rs6478109, rs56124762, rs1892231, rs16901748, rs12934476, rs9806914, rs1326860, rs4942248
   [0450] (60) rs6478109, rs56124762, rs1892231, rs16901748, rs12934476, rs9806914, rs1326860, rs7759385
   [0451] (61) rs6478109, rs56124762, rs1892231, rs16901748, rs12934476, rs9806914, rs12457255, rs2815844
   [0452] (62) rs6478109, rs56124762, rs1892231, rs16901748, rs12934476, rs9806914, rs12457255, rs10974900
   [0453] (63) rs6478109, rs56124762, rs1892231, rs16901748, rs12934476, rs9806914, rs12457255, rs2409750
   [0454] (64) rs6478109, rs56124762, rs1892231, rs16901748, rs12934476, rs9806914, rs12457255, rs1541020
   [0455] (65) rs6478109, rs56124762, rs1892231, rs16901748, rs12934476, rs9806914, rs12457255, rs4942248
   [0456] (66) rs6478109, rs56124762, rs1892231, rs16901748, rs12934476, rs9806914, rs12457255, rs7759385
   [0457] (67) rs6478109, rs56124762, rs1892231, rs16901748, rs12934476, rs9806914, rs2815844, rs10974900
   [0458] (68) rs6478109, rs56124762, rs1892231, rs16901748, rs12934476, rs9806914, rs2815844, rs2409750
   [0459] (69) rs6478109, rs56124762, rs1892231, rs16901748, rs12934476, rs9806914, rs2815844, rs1541020
   [0460] (70) rs6478109, rs56124762, rs1892231, rs16901748, rs12934476, rs9806914, rs2815844, rs4942248
   [0461] (71) rs6478109, rs56124762, rs1892231, rs16901748, rs12934476, rs9806914, rs2815844, rs7759385
   [0462] (72) rs6478109, rs56124762, rs1892231, rs16901748, rs12934476, rs9806914, rs10974900, rs2409750
   [0463] (73) rs6478109, rs56124762, rs1892231, rs16901748, rs12934476, rs9806914, rs10974900, rs1541020
   [0464] (74) rs6478109, rs56124762, rs1892231, rs16901748, rs12934476, rs9806914, rs10974900, rs4942248
   [0465] (75) rs6478109, rs56124762, rs1892231, rs16901748, rs12934476, rs9806914, rs10974900, rs7759385
   [0466] (76) rs6478109, rs56124762, rs1892231, rs16901748, rs12934476, rs9806914, rs2409750, rs1541020
   [0467] (77) rs6478109, rs56124762, rs1892231, rs16901748, rs12934476, rs9806914, rs2409750, rs4942248
   [0468] (78) rs6478109, rs56124762, rs1892231, rs16901748, rs12934476, rs9806914, rs2409750, rs7759385
   [0469] (79) rs6478109, rs56124762, rs1892231, rs16901748, rs12934476, rs9806914, rs1541020, rs4942248
   [0470] (80) rs6478109, rs56124762, rs1892231, rs16901748, rs12934476, rs9806914, rs1541020, rs7759385
   [0471] (81) rs6478109, rs56124762, rs1892231, rs16901748, rs12934476, rs9806914, rs4942248, rs7759385
   [0472] (82) rs6478109, rs56124762, rs1892231, rs16901748, rs12934476, rs2297437, rs1326860, rs12457255
   [0473] (83) rs6478109, rs56124762, rs1892231, rs16901748, rs12934476, rs2297437, rs1326860, rs2815844
   [0474] (84) rs6478109, rs56124762, rs1892231, rs16901748, rs12934476, rs2297437, rs1326860, rs10974900
   [0475] (85) rs6478109, rs56124762, rs1892231, rs16901748, rs12934476, rs2297437, rs1326860, rs2409750
   [0476] (86) rs6478109, rs56124762, rs1892231, rs16901748, rs12934476, rs2297437, rs1326860, rs1541020
   [0477] (87) rs6478109, rs56124762, rs1892231, rs16901748, rs12934476, rs2297437, rs1326860, rs4942248
   [0478] (88) rs6478109, rs56124762, rs1892231, rs16901748, rs12934476, rs2297437, rs1326860, rs7759385
   [0479] (89) rs6478109, rs56124762, rs1892231, rs16901748, rs12934476, rs2297437, rs12457255, rs2815844
   [0480] (90) rs6478109, rs56124762, rs1892231, rs16901748, rs12934476, rs2297437, rs12457255, rs10974900
   [0481] (91) rs6478109, rs56124762, rs1892231, rs16901748, rs12934476, rs2297437, rs12457255, rs2409750
   [0482] (92) rs6478109, rs56124762, rs1892231, rs16901748, rs12934476, rs2297437, rs12457255, rs1541020
   [0483] (93) rs6478109, rs56124762, rs1892231, rs16901748, rs12934476, rs2297437, rs12457255, rs4942248
   [0484] (94) rs6478109, rs56124762, rs1892231, rs16901748, rs12934476, rs2297437, rs12457255, rs7759385
   [0485] (95) rs6478109, rs56124762, rs1892231, rs16901748, rs12934476, rs2297437, rs2815844, rs10974900
   [0486] (96) rs6478109, rs56124762, rs1892231, rs16901748, rs12934476, rs2297437, rs2815844, rs2409750
   [0487] (97) rs6478109, rs56124762, rs1892231, rs16901748, rs12934476, rs2297437, rs2815844, rs1541020
   [0488] (98) rs6478109, rs56124762, rs1892231, rs16901748, rs12934476, rs2297437, rs2815844, rs4942248
   [0489] (99) rs6478109, rs56124762, rs1892231, rs16901748, rs12934476, rs2297437, rs2815844, rs7759385
   [0490] (100) rs6478109, rs56124762, rs1892231, rs16901748, rs12934476, rs2297437, rs10974900, rs2409750
   [0491] (101) rs6478109, rs56124762, rs1892231, rs16901748, rs12934476, rs2297437, rs10974900, rs1541020
   [0492] (102) rs6478109, rs56124762, rs1892231, rs16901748, rs12934476, rs2297437, rs10974900, rs4942248
   [0493] (103) rs6478109, rs56124762, rs1892231, rs16901748, rs12934476, rs2297437, rs10974900, rs7759385
   [0494] (104) rs6478109, rs56124762, rs1892231, rs16901748, rs12934476, rs2297437, rs2409750, rs1541020
   [0495] (105) rs6478109, rs56124762, rs1892231, rs16901748, rs12934476, rs2297437, rs2409750, rs4942248
   [0496] (106) rs6478109, rs56124762, rs1892231, rs16901748, rs12934476, rs2297437, rs2409750, rs7759385
   [0497] (107) rs6478109, rs56124762, rs1892231, rs16901748, rs12934476, rs2297437, rs1541020, rs4942248
   [0498] (108) rs6478109, rs56124762, rs1892231, rs16901748, rs12934476, rs2297437, rs1541020, rs7759385
   [0499] (109) rs6478109, rs56124762, rs1892231, rs16901748, rs12934476, rs2297437, rs4942248, rs7759385
   [0500] (110) rs6478109, rs56124762, rs1892231, rs16901748, rs12934476, rs1326860, rs12457255, rs2815844
   [0501] (111) rs6478109, rs56124762, rs1892231, rs16901748, rs12934476, rs1326860, rs12457255, rs10974900
   [0502] (112) rs6478109, rs56124762, rs1892231, rs16901748, rs12934476, rs1326860, rs12457255, rs2409750
   [0503] (113) rs6478109, rs56124762, rs1892231, rs16901748, rs12934476, rs1326860, rs12457255, rs1541020
   [0504] (114) rs6478109, rs56124762, rs1892231, rs16901748, rs12934476, rs1326860, rs12457255, rs4942248
   [0505] (115) rs6478109, rs56124762, rs1892231, rs16901748, rs12934476, rs1326860, rs12457255, rs7759385
   [0506] (116) rs6478109, rs56124762, rs1892231, rs16901748, rs12934476, rs1326860, rs2815844, rs10974900
   [0507] (117) rs6478109, rs56124762, rs1892231, rs16901748, rs12934476, rs1326860, rs2815844, rs2409750
   [0508] (118) rs6478109, rs56124762, rs1892231, rs16901748, rs12934476, rs1326860, rs2815844, rs1541020
   [0509] (119) rs6478109, rs56124762, rs1892231, rs16901748, rs12934476, rs1326860, rs2815844, rs4942248
   [0510] (120) rs6478109, rs56124762, rs1892231, rs16901748, rs12934476, rs1326860, rs2815844, rs7759385
   [0511] (121) rs6478109, rs56124762, rs1892231, rs16901748, rs12934476, rs1326860, rs10974900, rs2409750
   [0512] (122) rs6478109, rs56124762, rs1892231, rs16901748, rs12934476, rs1326860, rs10974900, rs1541020
   [0513] (123) rs6478109, rs56124762, rs1892231, rs16901748, rs12934476, rs1326860, rs10974900, rs4942248
   [0514] (124) rs6478109, rs56124762, rs1892231, rs16901748, rs12934476, rs1326860, rs10974900, rs7759385
   [0515] (125) rs6478109, rs56124762, rs1892231, rs16901748, rs12934476, rs1326860, rs2409750, rs1541020
   [0516] (126) rs6478109, rs56124762, rs1892231, rs16901748, rs12934476, rs1326860, rs2409750, rs4942248
   [0517] (127) rs6478109, rs56124762, rs1892231, rs16901748, rs12934476, rs1326860, rs2409750, rs7759385
   [0518] (128) rs6478109, rs56124762, rs1892231, rs16901748, rs12934476, rs1326860, rs1541020, rs4942248
   [0519] (129) rs6478109, rs56124762, rs1892231, rs16901748, rs12934476, rs1326860, rs1541020, rs7759385
   [0520] (130) rs6478109, rs56124762, rs1892231, rs16901748, rs12934476, rs1326860, rs4942248, rs7759385
   [0521] (131) rs6478109, rs56124762, rs1892231, rs16901748, rs12934476, rs12457255, rs2815844, rs10974900
   [0522] (132) rs6478109, rs56124762, rs1892231, rs16901748, rs12934476, rs12457255, rs2815844, rs2409750
   [0523] (133) rs6478109, rs56124762, rs1892231, rs16901748, rs12934476, rs12457255, rs2815844, rs1541020
   [0524] (134) rs6478109, rs56124762, rs1892231, rs16901748, rs12934476, rs12457255, rs2815844, rs4942248
   [0525] (135) rs6478109, rs56124762, rs1892231, rs16901748, rs12934476, rs12457255, rs2815844, rs7759385
   [0526] (136) rs6478109, rs56124762, rs1892231, rs16901748, rs12934476, rs12457255, rs10974900, rs2409750
   [0527] (137) rs6478109, rs56124762, rs1892231, rs16901748, rs12934476, rs12457255, rs10974900, rs1541020
   [0528] (138) rs6478109, rs56124762, rs1892231, rs16901748, rs12934476, rs12457255, rs10974900, rs4942248
   [0529] (139) rs6478109, rs56124762, rs1892231, rs16901748, rs12934476, rs12457255, rs10974900, rs7759385
   [0530] (140) rs6478109, rs56124762, rs1892231, rs16901748, rs12934476, rs12457255, rs2409750, rs1541020
   [0531] (141) rs6478109, rs56124762, rs1892231, rs16901748, rs12934476, rs12457255, rs2409750, rs4942248
   [0532] (142) rs6478109, rs56124762, rs1892231, rs16901748, rs12934476, rs12457255, rs2409750, rs7759385
   [0533] (143) rs6478109, rs56124762, rs1892231, rs16901748, rs12934476, rs12457255, rs1541020, rs4942248
   [0534] (144) rs6478109, rs56124762, rs1892231, rs16901748, rs12934476, rs12457255, rs1541020, rs7759385
   [0535] (145) rs6478109, rs56124762, rs1892231, rs16901748, rs12934476, rs12457255, rs4942248, rs7759385
   [0536] (146) rs6478109, rs56124762, rs1892231, rs16901748, rs12934476, rs2815844, rs10974900, rs2409750
   [0537] (147) rs6478109, rs56124762, rs1892231, rs16901748, rs12934476, rs2815844, rs10974900, rs1541020
   [0538] (148) rs6478109, rs56124762, rs1892231, rs16901748, rs12934476, rs2815844, rs10974900, rs4942248
   [0539] (149) rs6478109, rs56124762, rs1892231, rs16901748, rs12934476, rs2815844, rs10974900, rs7759385
   [0540] (150) rs6478109, rs56124762, rs1892231, rs16901748, rs12934476, rs2815844, rs2409750, rs1541020
   [0541] (151) rs6478109, rs56124762, rs1892231, rs16901748, rs12934476, rs2815844, rs2409750, rs4942248
   [0542] (152) rs6478109, rs56124762, rs1892231, rs16901748, rs12934476, rs2815844, rs2409750, rs7759385
   [0543] (153) rs6478109, rs56124762, rs1892231, rs16901748, rs12934476, rs2815844, rs1541020, rs4942248
   [0544] (154) rs6478109, rs56124762, rs1892231, rs16901748, rs12934476, rs2815844, rs1541020, rs7759385
   [0545] (155) rs6478109, rs56124762, rs1892231, rs16901748, rs12934476, rs2815844, rs4942248, rs7759385
   [0546] (156) rs6478109, rs56124762, rs1892231, rs16901748, rs12934476, rs10974900, rs2409750, rs1541020
   [0547] (157) rs6478109, rs56124762, rs1892231, rs16901748, rs12934476, rs10974900, rs2409750, rs4942248
   [0548] (158) rs6478109, rs56124762, rs1892231, rs16901748, rs12934476, rs10974900, rs2409750, rs7759385
   [0549] (159) rs6478109, rs56124762, rs1892231, rs16901748, rs12934476, rs10974900, rs1541020, rs4942248
   [0550] (160) rs6478109, rs56124762, rs1892231, rs16901748, rs12934476, rs10974900, rs1541020, rs7759385
   [0551] (161) rs6478109, rs56124762, rs1892231, rs16901748, rs12934476, rs10974900, rs4942248, rs7759385
   [0552] (162) rs6478109, rs56124762, rs1892231, rs16901748, rs12934476, rs2409750, rs1541020, rs4942248
   [0553] (163) rs6478109, rs56124762, rs1892231, rs16901748, rs12934476, rs2409750, rs1541020, rs7759385
   [0554] (164) rs6478109, rs56124762, rs1892231, rs16901748, rs12934476, rs2409750, rs4942248, rs7759385
   [0555] (165) rs6478109, rs56124762, rs1892231, rs16901748, rs12934476, rs1541020, rs4942248, rs7759385
   [0556] (166) rs6478109, rs56124762, rs1892231, rs16901748, rs7935393, rs9806914, rs 2297437, rs1326860
   [0557] (167) rs6478109, rs56124762, rs1892231, rs16901748, rs7935393, rs9806914, rs 2297437, rs12457255
   [0558] (168) rs6478109, rs56124762, rs1892231, rs16901748, rs7935393, rs9806914, rs 2297437, rs2815844
   [0559] (169) rs6478109, rs56124762, rs1892231, rs16901748, rs7935393, rs9806914, rs 2297437, rs10974900
   [0560] (170) rs6478109, rs56124762, rs1892231, rs16901748, rs7935393, rs9806914, rs 2297437, rs2409750
   [0561] (171) rs6478109, rs56124762, rs1892231, rs16901748, rs7935393, rs9806914, rs 2297437, rs1541020
   [0562] (172) rs6478109, rs56124762, rs1892231, rs16901748, rs7935393, rs9806914, rs 2297437, rs4942248
   [0563] (173) rs6478109, rs56124762, rs1892231, rs16901748, rs7935393, rs9806914, rs 2297437, rs7759385
   [0564] (174) rs6478109, rs56124762, rs1892231, rs16901748, rs7935393, rs9806914, rs 1326860, rs12457255
   [0565] (175) rs6478109, rs56124762, rs1892231, rs16901748, rs7935393, rs9806914, rs 1326860, rs2815844
   [0566] (176) rs6478109, rs56124762, rs1892231, rs16901748, rs7935393, rs9806914, rs 1326860, rs10974900
   [0567] (177) rs6478109, rs56124762, rs1892231, rs16901748, rs7935393, rs9806914, rs 1326860, rs2409750
   [0568] (178) rs6478109, rs56124762, rs1892231, rs16901748, rs7935393, rs9806914, rs 1326860, rs1541020
   [0569] (179) rs6478109, rs56124762, rs1892231, rs16901748, rs7935393, rs9806914, rs 1326860, rs4942248
   [0570] (180) rs6478109, rs56124762, rs1892231, rs16901748, rs7935393, rs9806914, rs 1326860, rs7759385
   [0571] (181) rs6478109, rs56124762, rs1892231, rs16901748, rs7935393, rs9806914, rs 12457255, rs2815844
   [0572] (182) rs6478109, rs56124762, rs1892231, rs16901748, rs7935393, rs9806914, rs 12457255, rs10974900
   [0573] (183) rs6478109, rs56124762, rs1892231, rs16901748, rs7935393, rs9806914, rs 12457255, rs2409750
   [0574] (184) rs6478109, rs56124762, rs1892231, rs16901748, rs7935393, rs9806914, rs 12457255, rs1541020
   [0575] (185) rs6478109, rs56124762, rs1892231, rs16901748, rs7935393, rs9806914, rs 12457255, rs4942248
   [0576] (186) rs6478109, rs56124762, rs1892231, rs16901748, rs7935393, rs9806914, rs 12457255, rs7759385
   [0577] (187) rs6478109, rs56124762, rs1892231, rs16901748, rs7935393, rs9806914, rs 2815844, rs10974900
   [0578] (188) rs6478109, rs56124762, rs1892231, rs16901748, rs7935393, rs9806914, rs 2815844, rs2409750
   [0579] (189) rs6478109, rs56124762, rs1892231, rs16901748, rs7935393, rs9806914, rs 2815844, rs1541020
   [0580] (190) rs6478109, rs56124762, rs1892231, rs16901748, rs7935393, rs9806914, rs 2815844, rs4942248
   [0581] (191) rs6478109, rs56124762, rs1892231, rs16901748, rs7935393, rs9806914, rs 2815844, rs7759385
   [0582] (192) rs6478109, rs56124762, rs1892231, rs16901748, rs7935393, rs9806914, rs 10974900, rs2409750
   [0583] (193) rs6478109, rs56124762, rs1892231, rs16901748, rs7935393, rs9806914, rs 10974900, rs1541020
   [0584] (194) rs6478109, rs56124762, rs1892231, rs16901748, rs7935393, rs9806914, rs 10974900, rs4942248
   [0585] (195) rs6478109, rs56124762, rs1892231, rs16901748, rs7935393, rs9806914, rs 10974900, rs7759385
   [0586] (196) rs6478109, rs56124762, rs1892231, rs16901748, rs7935393, rs9806914, rs 2409750, rs1541020
   [0587] (197) rs6478109, rs56124762, rs1892231, rs16901748, rs7935393, rs9806914, rs 2409750, rs4942248
   [0588] (198) rs6478109, rs56124762, rs1892231, rs16901748, rs7935393, rs9806914, rs 2409750, rs7759385
   [0589] (199) rs6478109, rs56124762, rs1892231, rs16901748, rs7935393, rs9806914, rs 1541020, rs4942248
   [0590] (200) rs6478109, rs56124762, rs1892231, rs16901748, rs7935393, rs9806914, rs 1541020, rs7759385
   [0591] (201) rs6478109, rs56124762, rs1892231, rs16901748, rs7935393, rs9806914, rs 4942248, rs7759385
   [0592] (202) rs6478109, rs56124762, rs1892231, rs16901748, rs7935393, rs2297437, rs 1326860, rs12457255
   [0593] (203) rs6478109, rs56124762, rs1892231, rs16901748, rs7935393, rs2297437, rs 1326860, rs2815844
   [0594] (204) rs6478109, rs56124762, rs1892231, rs16901748, rs7935393, rs2297437, rs 1326860, rs10974900
   [0595] (205) rs6478109, rs56124762, rs1892231, rs16901748, rs7935393, rs2297437, rs 1326860, rs2409750
   [0596] (206) rs6478109, rs56124762, rs1892231, rs16901748, rs7935393, rs2297437, rs 1326860, rs1541020
   [0597] (207) rs6478109, rs56124762, rs1892231, rs16901748, rs7935393, rs2297437, rs 1326860, rs4942248
   [0598] (208) rs6478109, rs56124762, rs1892231, rs16901748, rs7935393, rs2297437, rs 1326860, rs7759385
   [0599] (209) rs6478109, rs56124762, rs1892231, rs16901748, rs7935393, rs2297437, rs 12457255, rs2815844
   [0600] (210) rs6478109, rs56124762, rs1892231, rs16901748, rs7935393, rs2297437, rs 12457255, rs10974900
   [0601] (211) rs6478109, rs56124762, rs1892231, rs16901748, rs7935393, rs2297437, rs 12457255, rs2409750
   [0602] (212) rs6478109, rs56124762, rs1892231, rs16901748, rs7935393, rs2297437, rs 12457255, rs1541020
   [0603] (213) rs6478109, rs56124762, rs1892231, rs16901748, rs7935393, rs2297437, rs 12457255, rs4942248
   [0604] (214) rs6478109, rs56124762, rs1892231, rs16901748, rs7935393, rs2297437, rs 12457255, rs7759385
   [0605] (215) rs6478109, rs56124762, rs1892231, rs16901748, rs7935393, rs2297437, rs 2815844, rs10974900
   [0606] (216) rs6478109, rs56124762, rs1892231, rs16901748, rs7935393, rs2297437, rs 2815844, rs2409750
   [0607] (217) rs6478109, rs56124762, rs1892231, rs16901748, rs7935393, rs2297437, rs 2815844, rs1541020
   [0608] (218) rs6478109, rs56124762, rs1892231, rs16901748, rs7935393, rs2297437, rs 2815844, rs4942248
   [0609] (219) rs6478109, rs56124762, rs1892231, rs16901748, rs7935393, rs2297437, rs 2815844, rs7759385
   [0610] (220) rs6478109, rs56124762, rs1892231, rs16901748, rs7935393, rs2297437, rs 10974900, rs2409750
   [0611] (221) rs6478109, rs56124762, rs1892231, rs16901748, rs7935393, rs2297437, rs 10974900, rs1541020
   [0612] (222) rs6478109, rs56124762, rs1892231, rs16901748, rs7935393, rs2297437, rs 10974900, rs4942248
   [0613] (223) rs6478109, rs56124762, rs1892231, rs16901748, rs7935393, rs2297437, rs 10974900, rs7759385
   [0614] (224) rs6478109, rs56124762, rs1892231, rs16901748, rs7935393, rs2297437, rs 2409750, rs1541020
   [0615] (225) rs6478109, rs56124762, rs1892231, rs16901748, rs7935393, rs2297437, rs 2409750, rs4942248
   [0616] (226) rs6478109, rs56124762, rs1892231, rs16901748, rs7935393, rs2297437, rs 2409750, rs7759385
   [0617] (227) rs6478109, rs56124762, rs1892231, rs16901748, rs7935393, rs2297437, rs 1541020, rs4942248
   [0618] (228) rs6478109, rs56124762, rs1892231, rs16901748, rs7935393, rs2297437, rs 1541020, rs7759385
   [0619] (229) rs6478109, rs56124762, rs1892231, rs16901748, rs7935393, rs2297437, rs 4942248, rs7759385
   [0620] (230) rs6478109, rs56124762, rs1892231, rs16901748, rs7935393, rs1326860, rs 12457255, rs2815844
   [0621] (231) rs6478109, rs56124762, rs1892231, rs16901748, rs7935393, rs1326860, rs 12457255, rs10974900
   [0622] (232) rs6478109, rs56124762, rs1892231, rs16901748, rs7935393, rs1326860, rs 12457255, rs2409750
   [0623] (233) rs6478109, rs56124762, rs1892231, rs16901748, rs7935393, rs1326860, rs 12457255, rs1541020
   [0624] (234) rs6478109, rs56124762, rs1892231, rs16901748, rs7935393, rs1326860, rs 12457255, rs4942248
   [0625] (235) rs6478109, rs56124762, rs1892231, rs16901748, rs7935393, rs1326860, rs 12457255, rs7759385
   [0626] (236) rs6478109, rs56124762, rs1892231, rs16901748, rs7935393, rs1326860, rs 2815844, rs10974900
   [0627] (237) rs6478109, rs56124762, rs1892231, rs16901748, rs7935393, rs1326860, rs 2815844, rs2409750
   [0628] (238) rs6478109, rs56124762, rs1892231, rs16901748, rs7935393, rs1326860, rs 2815844, rs1541020
   [0629] (239) rs6478109, rs56124762, rs1892231, rs16901748, rs7935393, rs1326860, rs 2815844, rs4942248
   [0630] (240) rs6478109, rs56124762, rs1892231, rs16901748, rs7935393, rs1326860, rs 2815844, rs7759385
   [0631] (241) rs6478109, rs56124762, rs1892231, rs16901748, rs7935393, rs1326860, rs 10974900, rs2409750
   [0632] (242) rs6478109, rs56124762, rs1892231, rs16901748, rs7935393, rs1326860, rs 10974900, rs1541020
   [0633] (243) rs6478109, rs56124762, rs1892231, rs16901748, rs7935393, rs1326860, rs 10974900, rs4942248
   [0634] (244) rs6478109, rs56124762, rs1892231, rs16901748, rs7935393, rs1326860, rs 10974900, rs7759385
   [0635] (245) rs6478109, rs56124762, rs1892231, rs16901748, rs7935393, rs1326860, rs 2409750, rs1541020
   [0636] (246) rs6478109, rs56124762, rs1892231, rs16901748, rs7935393, rs1326860, rs 2409750, rs4942248
   [0637] (247) rs6478109, rs56124762, rs1892231, rs16901748, rs7935393, rs1326860, rs 2409750, rs7759385
   [0638] (248) rs6478109, rs56124762, rs1892231, rs16901748, rs7935393, rs1326860, rs 1541020, rs4942248
   [0639] (249) rs6478109, rs56124762, rs1892231, rs16901748, rs7935393, rs1326860, rs 1541020, rs7759385
   [0640] (250) rs6478109, rs56124762, rs1892231, rs16901748, rs7935393, rs1326860, rs 4942248, rs7759385
   [0641] (251) rs6478109, rs56124762, rs1892231, rs16901748, rs7935393, rs12457255, rs2815844, rs10974900
   [0642] (252) rs6478109, rs56124762, rs1892231, rs16901748, rs7935393, rs12457255, rs2815844, rs2409750
   [0643] (253) rs6478109, rs56124762, rs1892231, rs16901748, rs7935393, rs12457255, rs2815844, rs1541020
   [0644] (254) rs6478109, rs56124762, rs1892231, rs16901748, rs7935393, rs12457255, rs2815844, rs4942248
   [0645] (255) rs6478109, rs56124762, rs1892231, rs16901748, rs7935393, rs12457255, rs2815844, rs7759385
   [0646] (256) rs6478109, rs56124762, rs1892231, rs16901748, rs7935393, rs12457255, rs10974900, rs2409750
   [0647] (257) rs6478109, rs56124762, rs1892231, rs16901748, rs7935393, rs12457255, rs10974900, rs1541020
   [0648] (258) rs6478109, rs56124762, rs1892231, rs16901748, rs7935393, rs12457255, rs10974900, rs4942248
   [0649] (259) rs6478109, rs56124762, rs1892231, rs16901748, rs7935393, rs12457255, rs10974900, rs7759385
   [0650] (260) rs6478109, rs56124762, rs1892231, rs16901748, rs7935393, rs12457255, rs2409750, rs1541020
   [0651] (261) rs6478109, rs56124762, rs1892231, rs16901748, rs7935393, rs12457255, rs2409750, rs4942248
   [0652] (262) rs6478109, rs56124762, rs1892231, rs16901748, rs7935393, rs12457255, rs2409750, rs7759385
   [0653] (263) rs6478109, rs56124762, rs1892231, rs16901748, rs7935393, rs12457255, rs1541020, rs4942248
   [0654] (264) rs6478109, rs56124762, rs1892231, rs16901748, rs7935393, rs12457255, rs1541020, rs7759385
   [0655] (265) rs6478109, rs56124762, rs1892231, rs16901748, rs7935393, rs12457255, rs4942248, rs7759385
   [0656] (266) rs6478109, rs56124762, rs1892231, rs16901748, rs7935393, rs2815844, rs 10974900, rs2409750
   [0657] (267) rs6478109, rs56124762, rs1892231, rs16901748, rs7935393, rs2815844, rs 10974900, rs1541020
   [0658] (268) rs6478109, rs56124762, rs1892231, rs16901748, rs7935393, rs2815844, rs 10974900, rs4942248
   [0659] (269) rs6478109, rs56124762, rs1892231, rs16901748, rs7935393, rs2815844, rs 10974900, rs7759385
   [0660] (270) rs6478109, rs56124762, rs1892231, rs16901748, rs7935393, rs2815844, rs 2409750, rs1541020
   [0661] (271) rs6478109, rs56124762, rs1892231, rs16901748, rs7935393, rs2815844, rs 2409750, rs4942248
   [0662] (272) rs6478109, rs56124762, rs1892231, rs16901748, rs7935393, rs2815844, rs 2409750, rs7759385
   [0663] (273) rs6478109, rs56124762, rs1892231, rs16901748, rs7935393, rs2815844, rs 1541020, rs4942248
   [0664] (274) rs6478109, rs56124762, rs1892231, rs16901748, rs7935393, rs2815844, rs 1541020, rs7759385
   [0665] (275) rs6478109, rs56124762, rs1892231, rs16901748, rs7935393, rs2815844, rs 4942248, rs7759385
   [0666] (276) rs6478109, rs56124762, rs1892231, rs16901748, rs7935393, rs10974900, rs2409750, rs1541020
   [0667] (277) rs6478109, rs56124762, rs1892231, rs16901748, rs7935393, rs10974900, rs2409750, rs4942248
   [0668] (278) rs6478109, rs56124762, rs1892231, rs16901748, rs7935393, rs10974900, rs2409750, rs7759385
   [0669] (279) rs6478109, rs56124762, rs1892231, rs16901748, rs7935393, rs10974900, rs1541020, rs4942248
   [0670] (280) rs6478109, rs56124762, rs1892231, rs16901748, rs7935393, rs10974900, rs1541020, rs7759385
   [0671] (281) rs6478109, rs56124762, rs1892231, rs16901748, rs7935393, rs10974900, rs4942248, rs7759385
   [0672] (282) rs6478109, rs56124762, rs1892231, rs16901748, rs7935393, rs2409750, rs 1541020, rs4942248
   [0673] (283) rs6478109, rs56124762, rs1892231, rs16901748, rs7935393, rs2409750, rs 1541020, rs7759385
   [0674] (284) rs6478109, rs56124762, rs1892231, rs16901748, rs7935393, rs2409750, rs 4942248, rs7759385
   [0675] (285) rs6478109, rs56124762, rs1892231, rs16901748, rs7935393, rs1541020, rs 4942248, rs7759385
   [0676] (286) rs6478109, rs56124762, rs1892231, rs16901748, rs9806914, rs2297437, rs 1326860, rs12457255
   [0677] (287) rs6478109, rs56124762, rs1892231, rs16901748, rs9806914, rs2297437, rs 1326860, rs2815844
   [0678] (288) rs6478109, rs56124762, rs1892231, rs16901748, rs9806914, rs2297437, rs 1326860, rs10974900
   [0679] (289) rs6478109, rs56124762, rs1892231, rs16901748, rs9806914, rs2297437, rs 1326860, rs2409750
   [0680] (290) rs6478109, rs56124762, rs1892231, rs16901748, rs9806914, rs2297437, rs 1326860, rs1541020
   [0681] (291) rs6478109, rs56124762, rs1892231, rs16901748, rs9806914, rs2297437, rs 1326860, rs4942248
   [0682] (292) rs6478109, rs56124762, rs1892231, rs16901748, rs9806914, rs2297437, rs 1326860, rs7759385
   [0683] (293) rs6478109, rs56124762, rs1892231, rs16901748, rs9806914, rs2297437, rs 12457255, rs2815844
   [0684] (294) rs6478109, rs56124762, rs1892231, rs16901748, rs9806914, rs2297437, rs 12457255, rs10974900
   [0685] (295) rs6478109, rs56124762, rs1892231, rs16901748, rs9806914, rs2297437, rs 12457255, rs2409750
   [0686] (296) rs6478109, rs56124762, rs1892231, rs16901748, rs9806914, rs2297437, rs 12457255, rs1541020
   [0687] (297) rs6478109, rs56124762, rs1892231, rs16901748, rs9806914, rs2297437, rs 12457255, rs4942248
   [0688] (298) rs6478109, rs56124762, rs1892231, rs16901748, rs9806914, rs2297437, rs 12457255, rs7759385
   [0689] (299) rs6478109, rs56124762, rs1892231, rs16901748, rs9806914, rs2297437, rs 2815844, rs10974900
   [0690] (300) rs6478109, rs56124762, rs1892231, rs16901748, rs9806914, rs2297437, rs 2815844, rs2409750
   [0691] (301) rs6478109, rs56124762, rs1892231, rs16901748, rs9806914, rs2297437, rs 2815844, rs1541020
   [0692] (302) rs6478109, rs56124762, rs1892231, rs16901748, rs9806914, rs2297437, rs 2815844, rs4942248
   [0693] (303) rs6478109, rs56124762, rs1892231, rs16901748, rs9806914, rs2297437, rs 2815844, rs7759385
   [0694] (304) rs6478109, rs56124762, rs1892231, rs16901748, rs9806914, rs2297437, rs 10974900, rs2409750
   [0695] (305) rs6478109, rs56124762, rs1892231, rs16901748, rs9806914, rs2297437, rs 10974900, rs1541020
   [0696] (306) rs6478109, rs56124762, rs1892231, rs16901748, rs9806914, rs2297437, rs 10974900, rs4942248
   [0697] (307) rs6478109, rs56124762, rs1892231, rs16901748, rs9806914, rs2297437, rs 10974900, rs7759385
   [0698] (308) rs6478109, rs56124762, rs1892231, rs16901748, rs9806914, rs2297437, rs 2409750, rs1541020
   [0699] (309) rs6478109, rs56124762, rs1892231, rs16901748, rs9806914, rs2297437, rs 2409750, rs4942248
   [0700] (310) rs6478109, rs56124762, rs1892231, rs16901748, rs9806914, rs2297437, rs 2409750, rs7759385
   [0701] (311) rs6478109, rs56124762, rs1892231, rs16901748, rs9806914, rs2297437, rs 1541020, rs4942248
   [0702] (312) rs6478109, rs56124762, rs1892231, rs16901748, rs9806914, rs2297437, rs 1541020, rs7759385
   [0703] (313) rs6478109, rs56124762, rs1892231, rs16901748, rs9806914, rs2297437, rs 4942248, rs7759385
   [0704] (314) rs6478109, rs56124762, rs1892231, rs16901748, rs9806914, rs1326860, rs 12457255, rs2815844
   [0705] (315) rs6478109, rs56124762, rs1892231, rs16901748, rs9806914, rs1326860, rs 12457255, rs10974900
   [0706] (316) rs6478109, rs56124762, rs1892231, rs16901748, rs9806914, rs1326860, rs 12457255, rs2409750
   [0707] (317) rs6478109, rs56124762, rs1892231, rs16901748, rs9806914, rs1326860, rs 12457255, rs1541020
   [0708] (318) rs6478109, rs56124762, rs1892231, rs16901748, rs9806914, rs1326860, rs 12457255, rs4942248
   [0709] (319) rs6478109, rs56124762, rs1892231, rs16901748, rs9806914, rs1326860, rs 12457255, rs7759385
   [0710] (320) rs6478109, rs56124762, rs1892231, rs16901748, rs9806914, rs1326860, rs 2815844, rs10974900
   [0711] (321) rs6478109, rs56124762, rs1892231, rs16901748, rs9806914, rs1326860, rs 2815844, rs2409750
   [0712] (322) rs6478109, rs56124762, rs1892231, rs16901748, rs9806914, rs1326860, rs 2815844, rs1541020
   [0713] (323) rs6478109, rs56124762, rs1892231, rs16901748, rs9806914, rs1326860, rs 2815844, rs4942248
   [0714] (324) rs6478109, rs56124762, rs1892231, rs16901748, rs9806914, rs1326860, rs 2815844, rs7759385
   [0715] (325) rs6478109, rs56124762, rs1892231, rs16901748, rs9806914, rs1326860, rs 10974900, rs2409750
   [0716] (326) rs6478109, rs56124762, rs1892231, rs16901748, rs9806914, rs1326860, rs 10974900, rs1541020
   [0717] (327) rs6478109, rs56124762, rs1892231, rs16901748, rs9806914, rs1326860, rs 10974900, rs4942248
   [0718] (328) rs6478109, rs56124762, rs1892231, rs16901748, rs9806914, rs1326860, rs 10974900, rs7759385
   [0719] (329) rs6478109, rs56124762, rs1892231, rs16901748, rs9806914, rs1326860, rs 2409750, rs1541020
   [0720] (330) rs6478109, rs56124762, rs1892231, rs16901748, rs9806914, rs1326860, rs 2409750, rs4942248
   [0721] (331) rs6478109, rs56124762, rs1892231, rs16901748, rs9806914, rs1326860, rs 2409750, rs7759385
   [0722] (332) rs6478109, rs56124762, rs1892231, rs16901748, rs9806914, rs1326860, rs 1541020, rs4942248
   [0723] (333) rs6478109, rs56124762, rs1892231, rs16901748, rs9806914, rs1326860, rs 1541020, rs7759385
   [0724] (334) rs6478109, rs56124762, rs1892231, rs16901748, rs9806914, rs1326860, rs 4942248, rs7759385
   [0725] (335) rs6478109, rs56124762, rs1892231, rs16901748, rs9806914, rs12457255, rs2815844, rs10974900
   [0726] (336) rs6478109, rs56124762, rs1892231, rs16901748, rs9806914, rs12457255, rs2815844, rs2409750
   [0727] (337) rs6478109, rs56124762, rs1892231, rs16901748, rs9806914, rs12457255, rs2815844, rs1541020
   [0728] (338) rs6478109, rs56124762, rs1892231, rs16901748, rs9806914, rs12457255, rs2815844, rs4942248
   [0729] (339) rs6478109, rs56124762, rs1892231, rs16901748, rs9806914, rs12457255, rs2815844, rs7759385
   [0730] (340) rs6478109, rs56124762, rs1892231, rs16901748, rs9806914, rs12457255, rs10974900, rs2409750
   [0731] (341) rs6478109, rs56124762, rs1892231, rs16901748, rs9806914, rs12457255, rs10974900, rs1541020
   [0732] (342) rs6478109, rs56124762, rs1892231, rs16901748, rs9806914, rs12457255, rs10974900, rs4942248
   [0733] (343) rs6478109, rs56124762, rs1892231, rs16901748, rs9806914, rs12457255, rs10974900, rs7759385
   [0734] (344) rs6478109, rs56124762, rs1892231, rs16901748, rs9806914, rs12457255, rs2409750, rs1541020
   [0735] (345) rs6478109, rs56124762, rs1892231, rs16901748, rs9806914, rs12457255, rs2409750, rs4942248
   [0736] (346) rs6478109, rs56124762, rs1892231, rs16901748, rs9806914, rs12457255, rs2409750, rs7759385
   [0737] (347) rs6478109, rs56124762, rs1892231, rs16901748, rs9806914, rs12457255, rs1541020, rs4942248
   [0738] (348) rs6478109, rs56124762, rs1892231, rs16901748, rs9806914, rs12457255, rs1541020, rs7759385
   [0739] (349) rs6478109, rs56124762, rs1892231, rs16901748, rs9806914, rs12457255, rs4942248, rs7759385
   [0740] (350) rs6478109, rs56124762, rs1892231, rs16901748, rs9806914, rs2815844, rs 10974900, rs2409750
   [0741] (351) rs6478109, rs56124762, rs1892231, rs16901748, rs9806914, rs2815844, rs 10974900, rs1541020
   [0742] (352) rs6478109, rs56124762, rs1892231, rs16901748, rs9806914, rs2815844, rs 10974900, rs4942248
   [0743] (353) rs6478109, rs56124762, rs1892231, rs16901748, rs9806914, rs2815844, rs 10974900, rs7759385
   [0744] (354) rs6478109, rs56124762, rs1892231, rs16901748, rs9806914, rs2815844, rs 2409750, rs1541020
   [0745] (355) rs6478109, rs56124762, rs1892231, rs16901748, rs9806914, rs2815844, rs 2409750, rs4942248
   [0746] (356) rs6478109, rs56124762, rs1892231, rs16901748, rs9806914, rs2815844, rs 2409750, rs7759385
   [0747] (357) rs6478109, rs56124762, rs1892231, rs16901748, rs9806914, rs2815844, rs 1541020, rs4942248
   [0748] (358) rs6478109, rs56124762, rs1892231, rs16901748, rs9806914, rs2815844, rs 1541020, rs7759385
   [0749] (359) rs6478109, rs56124762, rs1892231, rs16901748, rs9806914, rs2815844, rs 4942248, rs7759385
   [0750] (360) rs6478109, rs56124762, rs1892231, rs16901748, rs9806914, rs10974900, rs2409750, rs1541020
   [0751] (361) rs6478109, rs56124762, rs1892231, rs16901748, rs9806914, rs10974900, rs2409750, rs4942248
   [0752] (362) rs6478109, rs56124762, rs1892231, rs16901748, rs9806914, rs10974900, rs2409750, rs7759385
   [0753] (363) rs6478109, rs56124762, rs1892231, rs16901748, rs9806914, rs10974900, rs1541020, rs4942248
   [0754] (364) rs6478109, rs56124762, rs1892231, rs16901748, rs9806914, rs10974900, rs1541020, rs7759385
   [0755] (365) rs6478109, rs56124762, rs1892231, rs16901748, rs9806914, rs10974900, rs4942248, rs7759385
   [0756] (366) rs6478109, rs56124762, rs1892231, rs16901748, rs9806914, rs2409750, rs 1541020, rs4942248
   [0757] (367) rs6478109, rs56124762, rs1892231, rs16901748, rs9806914, rs2409750, rs 1541020, rs7759385
   [0758] (368) rs6478109, rs56124762, rs1892231, rs16901748, rs9806914, rs2409750, rs 4942248, rs7759385
   [0759] (369) rs6478109, rs56124762, rs1892231, rs16901748, rs9806914, rs1541020, rs 4942248, rs7759385
   [0760] (370) rs6478109, rs56124762, rs1892231, rs16901748, rs2297437, rs1326860, rs 12457255, rs2815844
   [0761] (371) rs6478109, rs56124762, rs1892231, rs16901748, rs2297437, rs1326860, rs 12457255, rs10974900
   [0762] (372) rs6478109, rs56124762, rs1892231, rs16901748, rs2297437, rs1326860, rs 12457255, rs2409750
   [0763] (373) rs6478109, rs56124762, rs1892231, rs16901748, rs2297437, rs1326860, rs 12457255, rs1541020
   [0764] (374) rs6478109, rs56124762, rs1892231, rs16901748, rs2297437, rs1326860, rs 12457255, rs4942248
   [0765] (375) rs6478109, rs56124762, rs1892231, rs16901748, rs2297437, rs1326860, rs 12457255, rs7759385
   [0766] (376) rs6478109, rs56124762, rs1892231, rs16901748, rs2297437, rs1326860, rs 2815844, rs10974900
   [0767] (377) rs6478109, rs56124762, rs1892231, rs16901748, rs2297437, rs1326860, rs 2815844, rs2409750
   [0768] (378) rs6478109, rs56124762, rs1892231, rs16901748, rs2297437, rs1326860, rs 2815844, rs1541020
   [0769] (379) rs6478109, rs56124762, rs1892231, rs16901748, rs2297437, rs1326860, rs 2815844, rs4942248
   [0770] (380) rs6478109, rs56124762, rs1892231, rs16901748, rs2297437, rs1326860, rs 2815844, rs7759385
   [0771] (381) rs6478109, rs56124762, rs1892231, rs16901748, rs2297437, rs1326860, rs 10974900, rs2409750
   [0772] (382) rs6478109, rs56124762, rs1892231, rs16901748, rs2297437, rs1326860, rs 10974900, rs1541020
   [0773] (383) rs6478109, rs56124762, rs1892231, rs16901748, rs2297437, rs1326860, rs 10974900, rs4942248
   [0774] (384) rs6478109, rs56124762, rs1892231, rs16901748, rs2297437, rs1326860, rs 10974900, rs7759385
   [0775] (385) rs6478109, rs56124762, rs1892231, rs16901748, rs2297437, rs1326860, rs 2409750, rs1541020
   [0776] (386) rs6478109, rs56124762, rs1892231, rs16901748, rs2297437, rs1326860, rs 2409750, rs4942248
   [0777] (387) rs6478109, rs56124762, rs1892231, rs16901748, rs2297437, rs1326860, rs 2409750, rs7759385
   [0778] (388) rs6478109, rs56124762, rs1892231, rs16901748, rs2297437, rs1326860, rs 1541020, rs4942248
   [0779] (389) rs6478109, rs56124762, rs1892231, rs16901748, rs2297437, rs1326860, rs 1541020, rs7759385
   [0780] (390) rs6478109, rs56124762, rs1892231, rs16901748, rs2297437, rs1326860, rs 4942248, rs7759385
   [0781] (391) rs6478109, rs56124762, rs1892231, rs16901748, rs2297437, rs12457255, rs2815844, rs10974900
   [0782] (392) rs6478109, rs56124762, rs1892231, rs16901748, rs2297437, rs12457255, rs2815844, rs2409750
   [0783] (393) rs6478109, rs56124762, rs1892231, rs16901748, rs2297437, rs12457255, rs2815844, rs1541020
   [0784] (394) rs6478109, rs56124762, rs1892231, rs16901748, rs2297437, rs12457255, rs2815844, rs4942248
   [0785] (395) rs6478109, rs56124762, rs1892231, rs16901748, rs2297437, rs12457255, rs2815844, rs7759385
   [0786] (396) rs6478109, rs56124762, rs1892231, rs16901748, rs2297437, rs12457255, rs10974900, rs2409750
   [0787] (397) rs6478109, rs56124762, rs1892231, rs16901748, rs2297437, rs12457255, rs10974900, rs1541020
   [0788] (398) rs6478109, rs56124762, rs1892231, rs16901748, rs2297437, rs12457255, rs10974900, rs4942248
   [0789] (399) rs6478109, rs56124762, rs1892231, rs16901748, rs2297437, rs12457255, rs10974900, rs7759385
   [0790] (400) rs6478109, rs56124762, rs1892231, rs16901748, rs2297437, rs12457255, rs2409750, rs1541020
   [0791] (401) rs6478109, rs56124762, rs1892231, rs16901748, rs2297437, rs12457255, rs2409750, rs4942248
   [0792] (402) rs6478109, rs56124762, rs1892231, rs16901748, rs2297437, rs12457255, rs2409750, rs7759385
   [0793] (403) rs6478109, rs56124762, rs1892231, rs16901748, rs2297437, rs12457255, rs1541020, rs4942248
   [0794] (404) rs6478109, rs56124762, rs1892231, rs16901748, rs2297437, rs12457255, rs1541020, rs7759385
   [0795] (405) rs6478109, rs56124762, rs1892231, rs16901748, rs2297437, rs12457255, rs4942248, rs7759385
   [0796] (406) rs6478109, rs56124762, rs1892231, rs16901748, rs2297437, rs2815844, rs 10974900, rs2409750
   [0797] (407) rs6478109, rs56124762, rs1892231, rs16901748, rs2297437, rs2815844, rs 10974900, rs1541020
   [0798] (408) rs6478109, rs56124762, rs1892231, rs16901748, rs2297437, rs2815844, rs 10974900, rs4942248
   [0799] (409) rs6478109, rs56124762, rs1892231, rs16901748, rs2297437, rs2815844, rs 10974900, rs7759385
   [0800] (410) rs6478109, rs56124762, rs1892231, rs16901748, rs2297437, rs2815844, rs 2409750, rs1541020
   [0801] (411) rs6478109, rs56124762, rs1892231, rs16901748, rs2297437, rs2815844, rs 2409750, rs4942248
   [0802] (412) rs6478109, rs56124762, rs1892231, rs16901748, rs2297437, rs2815844, rs 2409750, rs7759385
   [0803] (413) rs6478109, rs56124762, rs1892231, rs16901748, rs2297437, rs2815844, rs 1541020, rs4942248
   [0804] (414) rs6478109, rs56124762, rs1892231, rs16901748, rs2297437, rs2815844, rs 1541020, rs7759385
   [0805] (415) rs6478109, rs56124762, rs1892231, rs16901748, rs2297437, rs2815844, rs 4942248, rs7759385
   [0806] (416) rs6478109, rs56124762, rs1892231, rs16901748, rs2297437, rs10974900, rs2409750, rs1541020
   [0807] (417) rs6478109, rs56124762, rs1892231, rs16901748, rs2297437, rs10974900, rs2409750, rs4942248
   [0808] (418) rs6478109, rs56124762, rs1892231, rs16901748, rs2297437, rs10974900, rs2409750, rs7759385
   [0809] (419) rs6478109, rs56124762, rs1892231, rs16901748, rs2297437, rs10974900, rs1541020, rs4942248
   [0810] (420) rs6478109, rs56124762, rs1892231, rs16901748, rs2297437, rs10974900, rs1541020, rs7759385
   [0811] (421) rs6478109, rs56124762, rs1892231, rs16901748, rs2297437, rs10974900, rs4942248, rs7759385
   [0812] (422) rs6478109, rs56124762, rs1892231, rs16901748, rs2297437, rs2409750, rs 1541020, rs4942248
   [0813] (423) rs6478109, rs56124762, rs1892231, rs16901748, rs2297437, rs2409750, rs 1541020, rs7759385
   [0814] (424) rs6478109, rs56124762, rs1892231, rs16901748, rs2297437, rs2409750, rs 4942248, rs7759385
   [0815] (425) rs6478109, rs56124762, rs1892231, rs16901748, rs2297437, rs1541020, rs 4942248, rs7759385
   [0816] (426) rs6478109, rs56124762, rs1892231, rs16901748, rs1326860, rs12457255, rs2815844, rs10974900
   [0817] (427) rs6478109, rs56124762, rs1892231, rs16901748, rs1326860, rs12457255, rs2815844, rs2409750
   [0818] (428) rs6478109, rs56124762, rs1892231, rs16901748, rs1326860, rs12457255, rs2815844, rs1541020
   [0819] (429) rs6478109, rs56124762, rs1892231, rs16901748, rs1326860, rs12457255, rs2815844, rs4942248
   [0820] (430) rs6478109, rs56124762, rs1892231, rs16901748, rs1326860, rs12457255, rs2815844, rs7759385
   [0821] (431) rs6478109, rs56124762, rs1892231, rs16901748, rs1326860, rs12457255, rs10974900, rs2409750
   [0822] (432) rs6478109, rs56124762, rs1892231, rs16901748, rs1326860, rs12457255, rs10974900, rs1541020
   [0823] (433) rs6478109, rs56124762, rs1892231, rs16901748, rs1326860, rs12457255, rs10974900, rs4942248
   [0824] (434) rs6478109, rs56124762, rs1892231, rs16901748, rs1326860, rs12457255, rs10974900, rs7759385
   [0825] (435) rs6478109, rs56124762, rs1892231, rs16901748, rs1326860, rs12457255, rs2409750, rs1541020
   [0826] (436) rs6478109, rs56124762, rs1892231, rs16901748, rs1326860, rs12457255, rs2409750, rs4942248
   [0827] (437) rs6478109, rs56124762, rs1892231, rs16901748, rs1326860, rs12457255, rs2409750, rs7759385
   [0828] (438) rs6478109, rs56124762, rs1892231, rs16901748, rs1326860, rs12457255, rs1541020, rs4942248
   [0829] (439) rs6478109, rs56124762, rs1892231, rs16901748, rs1326860, rs12457255, rs1541020, rs7759385
   [0830] (440) rs6478109, rs56124762, rs1892231, rs16901748, rs1326860, rs12457255, rs4942248, rs7759385
   [0831] (441) rs6478109, rs56124762, rs1892231, rs16901748, rs1326860, rs2815844, rs 10974900, rs2409750
   [0832] (442) rs6478109, rs56124762, rs1892231, rs16901748, rs1326860, rs2815844, rs 10974900, rs1541020
   [0833] (443) rs6478109, rs56124762, rs1892231, rs16901748, rs1326860, rs2815844, rs 10974900, rs4942248
   [0834] (444) rs6478109, rs56124762, rs1892231, rs16901748, rs1326860, rs2815844, rs 10974900, rs7759385
   [0835] (445) rs6478109, rs56124762, rs1892231, rs16901748, rs1326860, rs2815844, rs 2409750, rs1541020
   [0836] (446) rs6478109, rs56124762, rs1892231, rs16901748, rs1326860, rs2815844, rs 2409750, rs4942248
   [0837] (447) rs6478109, rs56124762, rs1892231, rs16901748, rs1326860, rs2815844, rs 2409750, rs7759385
   [0838] (448) rs6478109, rs56124762, rs1892231, rs16901748, rs1326860, rs2815844, rs 1541020, rs4942248
   [0839] (449) rs6478109, rs56124762, rs1892231, rs16901748, rs1326860, rs2815844, rs 1541020, rs7759385
   [0840] (450) rs6478109, rs56124762, rs1892231, rs16901748, rs1326860, rs2815844, rs 4942248, rs7759385
   [0841] (451) rs6478109, rs56124762, rs1892231, rs16901748, rs1326860, rs10974900, rs2409750, rs1541020
   [0842] (452) rs6478109, rs56124762, rs1892231, rs16901748, rs1326860, rs10974900, rs2409750, rs4942248
   [0843] (453) rs6478109, rs56124762, rs1892231, rs16901748, rs1326860, rs10974900, rs2409750, rs7759385
   [0844] (454) rs6478109, rs56124762, rs1892231, rs16901748, rs1326860, rs10974900, rs1541020, rs4942248
   [0845] (455) rs6478109, rs56124762, rs1892231, rs16901748, rs1326860, rs10974900, rs1541020, rs7759385
   [0846] (456) rs6478109, rs56124762, rs1892231, rs16901748, rs1326860, rs10974900, rs4942248, rs7759385
   [0847] (457) rs6478109, rs56124762, rs1892231, rs16901748, rs1326860, rs2409750, rs 1541020, rs4942248
   [0848] (458) rs6478109, rs56124762, rs1892231, rs16901748, rs1326860, rs2409750, rs 1541020, rs7759385
   [0849] (459) rs6478109, rs56124762, rs1892231, rs16901748, rs1326860, rs2409750, rs 4942248, rs7759385
   [0850] (460) rs6478109, rs56124762, rs1892231, rs16901748, rs1326860, rs1541020, rs 4942248, rs7759385
   [0851] (461) rs6478109, rs56124762, rs1892231, rs16901748, rs12457255, rs2815844, rs10974900, rs2409750
   [0852] (462) rs6478109, rs56124762, rs1892231, rs16901748, rs12457255, rs2815844, rs10974900, rs1541020
   [0853] (463) rs6478109, rs56124762, rs1892231, rs16901748, rs12457255, rs2815844, rs10974900, rs4942248
   [0854] (464) rs6478109, rs56124762, rs1892231, rs16901748, rs12457255, rs2815844, rs10974900, rs7759385
   [0855] (465) rs6478109, rs56124762, rs1892231, rs16901748, rs12457255, rs2815844, rs2409750, rs1541020
   [0856] (466) rs6478109, rs56124762, rs1892231, rs16901748, rs12457255, rs2815844, rs2409750, rs4942248
   [0857] (467) rs6478109, rs56124762, rs1892231, rs16901748, rs12457255, rs2815844, rs2409750, rs7759385
   [0858] (468) rs6478109, rs56124762, rs1892231, rs16901748, rs12457255, rs2815844, rs1541020, rs4942248
   [0859] (469) rs6478109, rs56124762, rs1892231, rs16901748, rs12457255, rs2815844, rs1541020, rs7759385
   [0860] (470) rs6478109, rs56124762, rs1892231, rs16901748, rs12457255, rs2815844, rs4942248, rs7759385
   [0861] (471) rs6478109, rs56124762, rs1892231, rs16901748, rs12457255, rs10974900, rs2409750, rs1541020
   [0862] (472) rs6478109, rs56124762, rs1892231, rs16901748, rs12457255, rs10974900, rs2409750, rs4942248
   [0863] (473) rs6478109, rs56124762, rs1892231, rs16901748, rs12457255, rs10974900, rs2409750, rs7759385
   [0864] (474) rs6478109, rs56124762, rs1892231, rs16901748, rs12457255, rs10974900, rs1541020, rs4942248
   [0865] (475) rs6478109, rs56124762, rs1892231, rs16901748, rs12457255, rs10974900, rs1541020, rs7759385
   [0866] (476) rs6478109, rs56124762, rs1892231, rs16901748, rs12457255, rs10974900, rs4942248, rs7759385
   [0867] (477) rs6478109, rs56124762, rs1892231, rs16901748, rs12457255, rs2409750, rs1541020, rs4942248
   [0868] (478) rs6478109, rs56124762, rs1892231, rs16901748, rs12457255, rs2409750, rs1541020, rs7759385
   [0869] (479) rs6478109, rs56124762, rs1892231, rs16901748, rs12457255, rs2409750, rs4942248, rs7759385
   [0870] (480) rs6478109, rs56124762, rs1892231, rs16901748, rs12457255, rs1541020, rs4942248, rs7759385
   [0871] (481) rs6478109, rs56124762, rs1892231, rs16901748, rs2815844, rs10974900, rs2409750, rs1541020
   [0872] (482) rs6478109, rs56124762, rs1892231, rs16901748, rs2815844, rs10974900, rs2409750, rs4942248
   [0873] (483) rs6478109, rs56124762, rs1892231, rs16901748, rs2815844, rs10974900, rs2409750, rs7759385
   [0874] (484) rs6478109, rs56124762, rs1892231, rs16901748, rs2815844, rs10974900, rs1541020, rs4942248
   [0875] (485) rs6478109, rs56124762, rs1892231, rs16901748, rs2815844, rs10974900, rs1541020, rs7759385
   [0876] (486) rs6478109, rs56124762, rs1892231, rs16901748, rs2815844, rs10974900, rs4942248, rs7759385
   [0877] (487) rs6478109, rs56124762, rs1892231, rs16901748, rs2815844, rs2409750, rs 1541020, rs4942248
   [0878] (488) rs6478109, rs56124762, rs1892231, rs16901748, rs2815844, rs2409750, rs 1541020, rs7759385
   [0879] (489) rs6478109, rs56124762, rs1892231, rs16901748, rs2815844, rs2409750, rs 4942248, rs7759385
   [0880] (490) rs6478109, rs56124762, rs1892231, rs16901748, rs2815844, rs1541020, rs 4942248, rs7759385
   [0881] (491) rs6478109, rs56124762, rs1892231, rs16901748, rs10974900, rs2409750, rs1541020, rs4942248
   [0882] (492) rs6478109, rs56124762, rs1892231, rs16901748, rs10974900, rs2409750, rs1541020, rs7759385
   [0883] (493) rs6478109, rs56124762, rs1892231, rs16901748, rs10974900, rs2409750, rs4942248, rs7759385
   [0884] (494) rs6478109, rs56124762, rs1892231, rs16901748, rs10974900, rs1541020, rs4942248, rs7759385
   [0885] (495) rs6478109, rs56124762, rs1892231, rs16901748, rs2409750, rs1541020, rs 4942248, rs7759385
[0886] 55. The genotype of embodiments 1-53, wherein the genotype comprises a minor allele provided in Table 1 for at least one polymorphism.
[0887] 56. The genotype of embodiments 1-53, wherein the genotype comprises a major allele provided in Table 1 for at least one polymorphism.
[0888] 57. The genotype of embodiments 1-56, wherein a presence of the genotype is predictive of a positive therapeutic response to a treatment with an inhibitor of TL1A activity of expression at a positive predictive value of at least about 55%, 60%, 65%, 70%, 75%, 80%, 85%, 90%, 91%, 92%, 93%, 94%, 95%, 96%, 97%, 98%, 99%, or 100%.
[0889] 58. The genotype of embodiments 1-57, wherein a presence of the genotype is predictive of a positive therapeutic response to a treatment with an inhibitor of TL1A activity of expression with a specificity of at least about 55%, 60%, 65%, 70%, 75%, 80%, 85%, 90%, 91%, 92%, 93%, 94%, 95%, 96%, 97%, 98%, 99%, or 100%.

[0890] Aspects disclosed herein provide genotypes that are associated with, and therefore indicative of, a subject having or being susceptible to developing a particular disease or condition, or a sub clinical phenotype thereof. In addition, the genotypes disclosed herein are associated with an increase TNFSF15 (TL1A) expression or activity. Thus, the genotypes are indicative that the subject will have a positive therapeutic response to an inhibitor of TL1A activity or expression. Table 1 provides exemplary polymorphisms associated with, and therefore predictive of, a positive therapeutic response to an inhibitor of TNFSF15 (TL1A) expression or activity. The term, “positive therapeutic response” refers to a reduction or an elimination of at least one symptom of the disease or the condition (e.g., Cohn's disease) after induction of a therapy (e.g., anti-TL1A antibody).

TABLE 1
Exemplary Polymorphisms

| | | | Minor | Major | SEQ |
|---|---|---|---|---|---|
| rsID | Chip_id | Gene | Allele | Allele | ID NO |
| rs11897732 | 1 kg_2_43394890 | THADA | G | A | 2001 |
| rs6740739 | 1 kg_2_43709147 | THADA, PLEKHH2 | A | G | 2002 |
| rs17796285 | 1 kg_8_11161865 | XKR6, MTMR9 | G | C | 2003 |
| rs7935393 | imm_11_127948309 | ETS1 | C | A | 2004 |
| rs12934476 | imm_16_11239010 | CLEC16A, SOCS1 | G | A | 2005 |
| rs12457255 | imm_18_12749976 | LOC100996324, PTPN2 | A | C | 2006 |
| rs2070557 | imm_21_44479552 | ICOSLG | A | T | 2007 |
| rs4246905 | imm_9_116593070 | TNFSF15 | A | G | 2008 |
| rs10974900 | imm_9_4977958 | JAK2 | A | G | 2009 |
| rs12434976 | rs12434976 | LINC01550, C14orf177 | C | A | 20010 |
| rs16901748 | rs16901748 | CTNND2 | A | C | 20011 |
| rs2815844 | rs2815844 | RGS7 | A | G | 20012 |
| rs889702 | rs889702 | RBFOX1 | G | A | 20013 |
| rs2409750 | 1 kg_8_11125104 | XKR6, MTMR9 | C | A | 20014 |
| rs1541020 | imm_10_6205036 | RBM17, PFKFB3 | A | G | 20015 |
| rs4942248 | imm_13_43304805 | ENOX1, CCDC122 | T | A | 20016 |
| rs12934476 | imm_16_11239010 | CLEC16A, SOCS1 | G | A | 20017 |
| rs12457255 | imm_18_12749976 | LOC100996324, PTPN2 | A | C | 20018 |
| rs2297437 | imm_20_61775718 | RTEL1-TNFRSF6B | A | G | 20019 |
| rs41309367 | imm_20_61779998 | RTEL1-TNFRSF6B | G | A | 20020 |
| rs10733509 | imm_9_4298050 | GLIS3, SLC1A1 | A | G | 20021 |
| rs10750376 | rs10750376 | LOC101929497, ETS1 | G | A | 20022 |
| rs10932456 | rs10932456 | MIR4776-2, IKZF2 | G | A | 20023 |
| rs1326860 | rs1326860 | LINC01031, NONE | A | G | 20024 |
| rs1528663 | rs1528663 | FAR1, SPON1 | G | A | 20025 |
| rs1892231 | rs1892231 | LINC01550, C14orf177 | C | A | 20026 |
| rs951279 | rs951279 | PLXNA2, MIR205HG | G | A | 20027 |
| rs9806914 | rs9806914 | RBFOX1 | A | G | 20028 |
| rs7935393 | imm_11_127948309 | ETS1 | C | A | 20029 |
| rs1690492 | imm_16_11226317 | CLEC16A, SOCS1 | G | C | 20030 |
| rs420726 | imm_21_44483873 | ICOSLG | G | A | 20031 |
| rs7759385 | imm_6_106695463 | PRDM1,ATG5 | T | A | 20032 |
| rs10974900 | imm_9_4977958 | JAK2 | A | G | 20033 |
| rs1326860 | rs1326860 | LINC01031, NONE | A | G | 20034 |
| rs2548147 | rs2548147 | LINC00603, PTGER4 | C | G | 20035 |
| rs2815844 | rs2815844 | RGS7 | A | G | 20036 |
| rs889702 | rs889702 | RBFOX1 | G | A | 20037 |
| rs9806914 | rs9806914 | RBFOX1 | A | G | 20038 |
| rs6478109 | imm_9_116608587 | TNFSF15 | A | G | 20039 |
| rs7278257 | imm_21_44478192 | ICOSLG | C | G | 20040 |
| rs11221332 | imm_11_127886184 | ETS1 | A | G | 20041 |
| rs56124762 | imm_21_44482902 | ICOSLG | A | G | 20057 |
| rs2070558 | imm_21_44480086 | ICOSLG | G | A | 20058 |
| rs2070561 | rs2070561 | ICOSLG | T | C | 20059 |

[0891] The instant disclosure provides models comprising 3 polymorphisms (e.g., “3-SNP Models”) that, when detected in a sample obtained from a subject, indicate a positive therapeutic response in the subject to a treatment, such as with an inhibitor of TL1A activity or expression. Non-limiting examples of models described herein include Model A (rs6478109, rs7278257, and rs1892231); Model B (rs6478109, rs2070557, and rs9806914); Model C (rs6478109, rs7935393, and rs1892231); Model D (rs6478109, rs7935393, and rs9806914); Model E (rs6478109, rs9806914, and rs16901748); Model F (rs6478109, rs16901748, and rs2297437); Model G (rs6478109, rs1892231, and rs16901748); Model H (rs6478109, rs2070557, and rs7935393); Model I (rs6478109, rs7278257, and rs7935393); Model J (rs6478109, rs9806914, and rs1892231); and Model K (rs6478109, rs7278257, and rs16901748).

### Methods of Treatment

[0892] Disclosed herein are methods of treating a disease or condition, or a symptom of the disease or condition, in a subject, comprising administrating of therapeutic effective amount of one or more therapeutic agents to the subject. In some embodiments, the one or more therapeutic agents is administered to the subject alone (e.g., standalone therapy). In some embodiments, the one or more therapeutic agents is administered in combination with an additional agent. In some embodiments, the therapeutic agent is a first-line therapy for the disease or condition. In some embodiments, the therapeutic agent is a second-line, third-line, or fourth-line therapy, for the disease or condition. In some embodiments, the therapeutic agent comprises an inhibitor of Tumor necrosis factor-like cytokine 1A (TL1A) activity or expression.

[0893] Various embodiments provide for methods of treating inflammatory bowel disease (IBD), comprising administering an anti-TL1A antibody described herein to a subject in need thereof. In some embodiments, the subject comprises one or more risk genotypes. In some embodiments, the IBD is a severe form of IBD.

[0894] In various embodiments, provided herein is a method of treating inflammatory bowel disease (IBD) in a subject in need thereof, comprising: administering to the subject a therapeutically effective amount of an antibody or an antigen-binding fragment that specifically binds TL1A. In some embodiments, the anti-TL1A antibody comprises antibody A. In some embodiments, the anti-TL1A antibody comprises antibody B. In some embodiments, the anti-TL1A antibody comprises antibody C. In some embodiments, the anti-TL1A antibody comprises antibody D. In some embodiments, the anti-TL1A antibody comprises antibody E. In some embodiments, the anti-TL1A antibody comprises antibody F. In some embodiments, the anti-TL1A antibody comprises antibody G. In some embodiments, the anti-TL1A antibody comprises antibody I. In some embodiments, the anti-TL1A antibody comprises antibody H. In some embodiments, the anti-TL1A antibody comprises antibody A2. In some embodiments, the anti-TL1A antibody comprises antibody B2. In some embodiments, the anti-TL1A antibody comprises antibody C2. In some embodiments, the anti-TL1A antibody comprises antibody D2. In some embodiments, the anti-TL1A antibody comprises antibody E2. In some embodiments, the anti-TL1A antibody comprises antibody F2. In some embodiments, the anti-TL1A antibody comprises antibody G2. In some embodiments, the anti-TL1A antibody comprises antibody I2. In some embodiments, the anti-TL1A antibody comprises antibody H2. In certain embodiments, the anti-TL1A antibody comprises any one of the antibodies of Table 10. In some embodiments, the anti-TL1A antibody comprises antibody A217. In some embodiments, the anti-TL1A antibody comprises antibody A220. In some embodiments, the anti-TL1A antibody comprises antibody A223. In some embodiments, the anti-TL1A antibody comprises antibody A219. In some embodiments, the anti-TL1A antibody comprises antibody A221. In some embodiments, the anti-TL1A antibody comprises antibody A200. In some embodiments, the anti-TL1A antibody comprises antibody A213. In some embodiments, the anti-TL1A antibody comprises antibody A212. In some embodiments, the anti-TL1A antibody comprises antibody A107. In some embodiments, the anti-TL1A antibody comprises antibody A205. In some embodiments, the anti-TL1A antibody comprises antibody A211. In some embodiments, the anti-TL1A antibody comprises antibody A199. In some embodiments, the anti-TL1A antibody comprises antibody A15. In some embodiments, the anti-TL1A antibody comprises antibody A30. In some embodiments, the anti-TL1A antibody comprises antibody A100. In some embodiments, the anti-TL1A antibody comprises antibody A181. In some embodiments, the anti-TL1A antibody comprises antibody A129. In some embodiments, the anti-TL1A antibody comprises antibody A214. In some embodiments, the anti-TL1A antibody comprises antibody A216. In some embodiments, the anti-TL1A antibody comprises antibody A122. In some embodiments, the anti-TL1A antibody comprises antibody A222. In some embodiments, the anti-TL1A antibody comprises antibody A188. In some embodiments, the anti-TL1A antibody comprises antibody A203. In some embodiments, the anti-TL1A antibody comprises antibody A147. In some embodiments, the anti-TL1A antibody comprises antibody A127. In some embodiments, the anti-TL1A antibody comprises antibody A126. In some embodiments, the anti-TL1A antibody comprises antibody A160. In some embodiments, the anti-TL1A antibody comprises antibody A157. In some embodiments, the anti-TL1A antibody comprises antibody A159. In some embodiments, the anti-TL1A antibody comprises antibody A218. In some embodiments, the anti-TL1A antibody comprises antibody A158. In some embodiments, the anti-TL1A antibody comprises antibody A125. In some embodiments, the anti-TL1A antibody comprises antibody A103. In some embodiments, the anti-TL1A antibody comprises antibody A64. In some embodiments, the anti-TL1A antibody comprises antibody A67. In some embodiments, the anti-TL1A antibody comprises antibody A138. In some embodiments, the anti-TL1A antibody comprises antibody A68. In some embodiments, the anti-TL1A antibody comprises antibody A94. In some embodiments, the anti-TL1A antibody comprises antibody A110. In some embodiments, the anti-TL1A antibody comprises antibody A197. In some embodiments, the anti-TL1A antibody comprises antibody A112. In some embodiments, the anti-TL1A antibody comprises antibody A169. In some embodiments, the anti-TL1A antibody comprises antibody A173. In some embodiments, the anti-TL1A antibody comprises antibody A179. In some embodiments, the anti-TL1A antibody comprises antibody A148. In some embodiments, the anti-TL1A antibody comprises antibody A115. In some embodiments, the anti-TL1A antibody comprises antibody A149. In some embodiments, the anti-TL1A antibody comprises antibody A134. In some embodiments, the anti-TL1A antibody comprises antibody A113. In some embodiments, the anti-TL1A antibody comprises antibody A151. In some embodiments, the anti-TL1A antibody comprises antibody A96. In some embodiments, the anti-TL1A antibody comprises antibody A132. In some embodiments, the anti-TL1A antibody comprises antibody A196. In some embodiments, the anti-TL1A antibody comprises antibody A172. In some embodiments, the anti-TL1A antibody comprises antibody A75. In some embodiments, the anti-TL1A antibody comprises antibody A174. In some embodiments, the anti-TL1A antibody comprises antibody A109. In some embodiments, the anti-TL1A antibody comprises antibody A198. In some embodiments, the anti-TL1A antibody comprises antibody A170. In certain embodiments, the anti-TL1A antibody comprises any one of the antibodies of Tables 20-21. In some embodiments, the anti-TL1A antibody comprises antibody clone 34. In some embodiments, the anti-TL1A antibody comprises antibody 5C3D11. In some embodiments, the anti-TL1A antibody comprises antibody 9E12E5. In some embodiments, the anti-TL1A antibody comprises antibody AS12824. In some embodiments, the anti-TL1A antibody comprises antibody AS12823. In some embodiments, the anti-TL1A antibody comprises antibody AS12819. In some embodiments, the anti-TL1A antibody comprises antibody AS12816. In some embodiments, the anti-TL1A antibody comprises antibody AS12825. In some embodiments, the anti-TL1A antibody comprises antibody I2835. In some embodiments, the anti-TL1A antibody comprises antibody 18-7 S93E. In some embodiments, the anti-TL1A antibody comprises antibody 18-7. In some embodiments, the anti-TL1A antibody comprises antibody 18-7 S92D. In some embodiments, the anti-TL1A antibody comprises antibody 18-7 S92H. In some embodiments, the anti-TL1A antibody comprises antibody 18-7 S92N. In some embodiments, the anti-TL1A antibody comprises antibody 18-7 S92Q. In some embodiments, the anti-TL1A antibody comprises antibody 18-7 CDRv. In some embodiments, the anti-TL1A antibody comprises antibody 21-3. In some embodiments, the anti-TL1A antibody comprises antibody 21-3 V102K. In some embodiments, the anti-TL1A antibody comprises antibody 21-3 V102M. In some embodiments, the anti-TL1A antibody comprises antibody 21-3 V102Q. In some embodiments, the anti-TL1A antibody comprises antibody 21-3 V102 W. In some embodiments, the anti-TL1A antibody comprises antibody 21-3 CDRv. In some embodiments, the anti-TL1A antibody comprises antibody 21-3 CDRv. In some embodiments, the anti-TL1A antibody comprises antibody clone 2. In some embodiments, the anti-TL1A antibody comprises antibody clone 52. In some embodiments, the anti-TL1A antibody comprises antibody clone 46. In some embodiments, the anti-TL1A antibody comprises antibody clone 47. In some embodiments, the anti-TL1A antibody comprises antibody clone 14. In some embodiments, the anti-TL1A antibody comprises antibody clone 16L. In some embodiments, the anti-TL1A antibody comprises antibody clone 17L. In some embodiments, the anti-TL1A antibody comprises antibody clone 17L-1. In some embodiments, the anti-TL1A antibody comprises antibody clone 23. In some embodiments, the anti-TL1A antibody comprises antibody clone 53. In some embodiments, the anti-TL1A antibody comprises antibody clone E1. In some embodiments, the anti-TL1A antibody comprises antibody clone 3-17L V-A. In some embodiments, the anti-TL1A antibody comprises antibody clone 3-17L. In some embodiments, the anti-TL1A antibody comprises antibody clone L8mod. In some embodiments, the anti-TL1A antibody comprises antibody clone X-V. In some embodiments, the anti-TL1A antibody comprises antibody clone X. In some embodiments, the anti-TL1A antibody comprises antibody clone XL3-6. In some embodiments, the anti-TL1A antibody comprises antibody clone XL3-10. In some embodiments, the anti-TL1A antibody comprises antibody clone XL3-15. In some embodiments, the anti-TL1A antibody comprises antibody clone L3-13. In some embodiments, the anti-TL1A antibody comprises antibody clone H3-1. In some embodiments, the anti-TL1A antibody comprises antibody clone H2-2. In some embodiments, the anti-TL1A antibody comprises antibody clone H2-5. In some embodiments, the anti-TL1A antibody comprises antibody M1. In some embodiments, the anti-TL1A antibody comprises antibody M2. In some embodiments, the anti-TL1A antibody comprises antibody M3. In some embodiments, the anti-TL1A antibody comprises antibody M4. In some embodiments, the anti-TL1A antibody comprises antibody M5. In some embodiments, the anti-TL1A antibody comprises antibody M6. In some embodiments, the anti-TL1A antibody comprises antibody M7. In some embodiments, the anti-TL1A antibody comprises antibody M8. In some embodiments, the anti-TL1A antibody comprises antibody M9. In some embodiments, the anti-TL1A antibody comprises antibody M10. In some embodiments, the anti-TL1A antibody comprises antibody M11. In some embodiments, the anti-TL1A antibody comprises antibody M12.

[0895] Methods disclosed herein provide methods of treating an inflammatory bowel disease (IBD) in a subject by administering an anti-TL1A antibody described herein to the subject. In various embodiments, IBD is Crohn's Disease (CD) or ulcerative colitis (UC). In some embodiments, the IBD is a severe form of IBD. In some embodiments, the IBD is a moderate to severe form of IBD. In some embodiments, the IBD is a moderate form of IBD. In various other embodiments, the subject is determined to have an increased TL1A expression. In some embodiments, the administration of a therapeutically effective amount of an anti-TL1A antibody causes a decrease in TL1A in the subject treated.

### Methods of Detection

[0896] Methods disclosed herein for detecting a genotype in a sample from a subject comprise analyzing the genetic material in the sample to detect at least one of a presence, an absence, and a quantity of a nucleic acid sequence encompassing the genotype of interest and administering an anti-TL1A antibody or antigen binding fragment as disclosed herein. In some embodiments, the sample is assayed to measure a presence, absence or quantity of at least three polymorphisms. In some embodiments, the sample is assayed to measure a presence, absence, or quantity of at least four polymorphisms. In some embodiments, the sample is assayed to measure a presence, absence, or quantity of at least five polymorphisms. In some embodiments, the sample is assayed to measure a presence, absence, or quantity of at least six polymorphisms. In some embodiments, the sample is assayed to measure a presence, absence, or quantity of at least seven polymorphisms. In some embodiments, the sample is assayed to measure a presence, absence, or quantity of at least eight polymorphisms. In some embodiments, at least three genotypes are detected, using the methods described herein. In some embodiments, at least eight genotypes are detected, using the methods described herein.

[0897] In some cases, the nucleic acid sequence comprises DNA. In some instances, the nucleic acid sequence comprises a denatured DNA molecule or fragment thereof. In some instances, the nucleic acid sequence comprises DNA selected from: genomic DNA, viral DNA, mitochondrial DNA, plasmid DNA, amplified DNA, circular DNA, circulating DNA, cell-free DNA, or exosomal DNA. In some instances, the DNA is single-stranded DNA (ssDNA), double-stranded DNA, denaturing double-stranded DNA, synthetic DNA, and combinations thereof. The circular DNA may be cleaved or fragmented. In some instances, the nucleic acid sequence comprises RNA. In some instances, the nucleic acid sequence comprises fragmented RNA. In some instances, the nucleic acid sequence comprises partially degraded RNA. In some instances, the nucleic acid sequence comprises a microRNA or portion thereof. In some instances, the nucleic acid sequence comprises an RNA molecule or a fragmented RNA molecule (RNA fragments) selected from: a microRNA (miRNA), a pre-miRNA, a pri-miRNA, a mRNA, a pre-mRNA, a viral RNA, a viroid RNA, a virusoid RNA, circular RNA (circRNA), a ribosomal RNA (rRNA), a transfer RNA (tRNA), a pre-tRNA, a long non-coding RNA (lncRNA), a small nuclear RNA (snRNA), a circulating RNA, a cell-free RNA, an exosomal RNA, a vector-expressed RNA, an RNA transcript, a synthetic RNA, and combinations thereof.

[0898] Nucleic acid-based detection techniques that may be useful for the methods herein include quantitative polymerase chain reaction (qPCR), gel electrophoresis, immunochemistry, in situ hybridization such as fluorescent in situ hybridization (FISH), cytochemistry, and next generation sequencing. In some embodiments, the methods involve TagMan™ qPCR, which involves a nucleic acid amplification reaction with a specific primer pair, and hybridization of the amplified nucleic acids with a hydrolysable probe specific to a target nucleic acid.

[0899] In some instances, the methods involve hybridization and/or amplification assays that include, but are not limited to, Southern or Northern analyses, polymerase chain reaction analyses, and probe arrays. Non-limiting amplification reactions include, but are not limited to, qPCR, self-sustained sequence replication, transcriptional amplification system, Q-Beta Replicase, rolling circle replication, or any other nucleic acid amplification known in the art. As discussed, reference to qPCR herein includes use of TagMan™ methods. An additional exemplary hybridization assay includes the use of nucleic acid probes conjugated or otherwise immobilized on a bead, multi-well plate, or other substrate, wherein the nucleic acid probes are configured to hybridize with a target nucleic acid sequence of a genotype provided herein. A non-limiting method is one employed in Anal Chem. 2013 Feb. 5; 85(3):1932-9.

[0900] In some embodiments, detecting the presence or absence of a genotype comprises sequencing genetic material from the subject. Sequencing can be performed with any appropriate sequencing technology, including but not limited to single-molecule real-time (SMRT) sequencing, Polony sequencing, sequencing by ligation, reversible terminator sequencing, proton detection sequencing, ion semiconductor sequencing, nanopore sequencing, electronic sequencing, pyrosequencing, Maxam-Gilbert sequencing, chain termination (e.g., Sanger) sequencing, +S sequencing, sequencing by binding (e.g., transient binding), or sequencing by synthesis. Sequencing methods also include next-generation sequencing, e.g., modern sequencing technologies such as Illumina sequencing (e.g., Solexa), Roche 454 sequencing, Ion torrent sequencing, sequencing by transient binding, and SOLiD sequencing. In some cases, next-generation sequencing involves high-throughput sequencing methods. Additional sequencing methods available to one of skill in the art may also be employed.

[0901] In some instances, a number of nucleotides that are sequenced are at least 5, 10, 15, 20, 25, 30, 35, 40, 45, 50, 100, 150, 200, 300, 400, 500, 2000, 4000, 6000, 8000, 10000, 20000, 50000, 100000, or more than 100000 nucleotides. In some instances, the number of nucleotides sequenced is in a range of about 1 to about 100000 nucleotides, about 1 to about 10000 nucleotides, about 1 to about 1000 nucleotides, about 1 to about 500 nucleotides, about 1 to about 300 nucleotides, about 1 to about 200 nucleotides, about 1 to about 100 nucleotides, about 5 to about 100000 nucleotides, about 5 to about 10000 nucleotides, about 5 to about 1000 nucleotides, about 5 to about 500 nucleotides, about 5 to about 300 nucleotides, about 5 to about 200 nucleotides, about 5 to about 100 nucleotides, about 10 to about 100000 nucleotides, about 10 to about 10000 nucleotides, about 10 to about 1000 nucleotides, about 10 to about 500 nucleotides, about 10 to about 300 nucleotides, about 10 to about 200 nucleotides, about 10 to about 100 nucleotides, about 20 to about 100000 nucleotides, about 20 to about 10000 nucleotides, about 20 to about 1000 nucleotides, about 20 to about 500 nucleotides, about 20 to about 300 nucleotides, about 20 to about 200 nucleotides, about 20 to about 100 nucleotides, about 30 to about 100000 nucleotides, about 30 to about 10000 nucleotides, about 30 to about 1000 nucleotides, about 30 to about 500 nucleotides, about 30 to about 300 nucleotides, about 30 to about 200 nucleotides, about 30 to about 100 nucleotides, about 50 to about 100000 nucleotides, about 50 to about 10000 nucleotides, about 50 to about 1000 nucleotides, about 50 to about 500 nucleotides, about 50 to about 300 nucleotides, about 50 to about 200 nucleotides, or about 50 to about 100 nucleotides.

[0902] Exemplary probes comprise a nucleic acid sequence of at least 10 contiguous nucleic acids provided in any one of SEQ ID NOS: 2001-2048, or 2057-2059, including the nucleobase indicated with a non-nucleobase letter (e.g., R, N, S), or a reverse complement thereof. In some instances, the probes may be used to detect the polymorphisms provided in Table 1, wherein the probe comprises a nucleic acid sequence of at least 10 contiguous nucleic acids provided in a corresponding SEQ ID NO or reverse complement thereof, the 10 contiguous nucleic acids comprising the “risk allele” also provided in Table 1 at a nucleoposition indicated with the non-nucleobase letter, or reverse complement thereof. In some embodiments, the probe comprises at least 70%, 80%, 85%, 90%, 91%, 92%, 93%, 94%, 95%, 96%, 97%, 98% or 99% sequence identity to any one of SEQ ID NOS: 2001-2048, or 2057-2059, or its reverse complement. In some instances, forward and reverse primers are used to amplify the target nucleic acid sequence. Forward and reverse primers may comprise a nucleic acid sequence flanking the risk allele provided in Table 1 corresponding to the nucleic acid sequence provided in any one of SEQ ID NOS: 2001-2048, or 2057-2059, or a reverse complement thereof.

[0903] Examples of molecules that are utilized as probes include, but are not limited to, RNA and DNA. In some embodiments, the term “probe” with regards to nucleic acids, refers to any molecule that is capable of selectively binding to a specifically intended target nucleic acid sequence. In some instances, probes are specifically designed to be labeled, for example, with a radioactive label, a fluorescent label, an enzyme, a chemiluminescent tag, a colorimetric tag, or other labels or tags that are known in the art. In some instances, the fluorescent label comprises a fluorophore. In some instances, the fluorophore is an aromatic or heteroaromatic compound. In some instances, the fluorophore is a pyrene, anthracene, naphthalene, acridine, stilbene, benzoxazole, indole, benzindole, oxazole, thiazole, benzothiazole, canine, carbocyanine, salicylate, anthranilate, xanthenes dye, coumarin. Exemplary xanthene dyes include, e.g., fluorescein and rhodamine dyes. Fluorescein and rhodamine dyes include, but are not limited to 6-carboxyfluorescein (FAM), 2′7′-dimethoxy-4′5′-dichloro-6-carboxyfluorescein (JOE), tetrachlorofluorescein (TET), 6-carboxyrhodamine (R6G), N,N,N; N′-tetramethyl-6-carboxyrhodamine (TAMRA), 6-carboxy-X-rhodamine (ROX). Suitable fluorescent probes also include the naphthylamine dyes that have an amino group in the alpha or beta position. For example, naphthylamino compounds include 1-dimethylaminonaphthyl-5-sulfonate, 1-anilino-8-naphthalene sulfonate and 2-p-toluidinyl-6-naphthalene sulfonate, 5-(2′-aminoethyl)aminonaphthalene-1-sulfonic acid (EDANS). Exemplary coumarins include, e.g., 3-phenyl-7-isocyanatocoumarin; acridines, such as 9-isothiocyanatoacridine and acridine orange; N-(p-(2-benzoxazolyl)phenyl) maleimide; cyanines, such as, e.g., indodicarbocyanine 3 (Cy3), indodicarbocyanine 5 (Cy5), indodicarbocyanine 5.5 (Cy5.5), 3-(-carboxy-pentyl)-3′-ethyl-5,5′-dimethyloxacarbocyanine (CyA); 1H, 5H, 11H, 15H-Xantheno[2,3,4-ij: 5,6,7-i′j′]diquinolizin-18-ium, 9-[2 (or 4)-[[[6-[2,5-dioxo-1-pyrrolidinyl)oxy]-6-oxohexyl]amino]sulfonyl]-4 (or 2)-sulfophenyl]-2,3, 6,7, 12,13, 16,17-octahydro-inner salt (TR or Texas Red); or BODIPYTM dyes. In some cases, the probe comprises FAM as the dye label.

[0904] In some instances, primers and/or probes described herein for detecting a target nucleic acid are used in an amplification reaction. In some instances, the amplification reaction is qPCR. An exemplary qPCR is a method employing a TagMan™ assay. Non-limiting examples of primer pairs useful for detecting one or more polymorphisms described herein are provided in Table 2, below.

TABLE 2
Exemplary Primer Sequences

| rsID | Forward Primer | Reverse Primer | Wt_Probe_Hex | Mut_Probe_FAM |
|---|---|---|---|---|
| rs6478109 | TGCTTCTGGAAG | TGAGGTTCAAA | TG+C +AG+A | TG+C +AGG |
| | TGAAAGT (SEQ | ATGACAGAGG | +T+TG GGA | +TTG GGA (SEQ |
| | ID NO: 364101) | (SEQ ID NO: | (SEQ ID NO: | ID NO: 364131) |
| | | 364111) | 364121) | |
| rs1892231 | GTCATCATCGCT | TTT TCA ATG | AT +T+TG | ATT TGG |
| | TTCATGTG (SEQ | CAC AGA TTT | +G+A+A | +C+A+A GGG |
| | ID NO: 364102) | AAG GA (SEQ ID | AGGG+AA | AA (SEQ ID NO: |
| | | NO: 364112) | (SEQ ID NO: | 364132) |
| | | | 364122) | |
| rs7935393 | CTGGATGCTCAC | CCT AAG GAG | AG+A A+T+A | T+AG +AA+T |
| | AGGTTTG (SEQ | ACT TTT AGT | +CA+C A+AG | +C+C+A CAA |
| | ID NO: 364103) | TCT AAG (SEQ ID | GA (SEQ ID | (SEQ ID NO: |
| | | NO: 364113) | NO: 364123) | 364133) |
| rs7278257 | AGTCCCTGTTCT | ATGGGGAACGT | TC+C +TA+G | T+C+C TA+G |
| | GAATCCTCT | TGTGGCAG (SEQ | +C+G+A TA | +G+GA TA (SEQ |
| | (SEQ ID NO: | ID NO: 364114) | (SEQ ID NO: | ID NO: 364134) |
| | 364104) | | 364124) | |
| rs2070557 | CTT TTT GTC TCC | CGG CAG CCA | CGG GC+A | TCG GGC |
| | TAC CTC AGA GG | GAC AGG TAA | +C+AG C+TC | +TC+A GC+T C |
| | (SEQ ID NO: | (SEQ ID NO: | (SEQ ID NO: | (SEQ ID NO: |
| | 364105) | 364115) | 364125) | 364135) |
| rs9806914 | ATAAGAACCTCT | ACAGAGGCAGT | A+GT +GAT | AGT GAT |
| | GCTGCACA (SEQ | ATAGCACAG | T+G+A +CT+C | T+G+G +CTC |
| | ID NO: 364106) | (SEQ ID NO: | AA (SEQ ID | AA (SEQ ID NO: |
| | | 364116) | NO: 364126) | 364136) |
| rs16901748 | TTGGGAATCAGA | ATC AAG TCA | C+CA TTA | A+C+C ATT |
| | TAGGTGCA (SEQ | CAA CTG CCA | A+A+G +T+CA | AA+A +T+T+C |
| | ID NO: 364107) | GA (SEQ ID NO: | +GA (SEQ ID | AGA (SEQ ID |
| | | 364117) | NO: 364127) | NO: 364137) |
| rs56124762 | AAA CAG GAA | GCTCTGCCTTCA | TAG +T+T+A | TAG T+T+A |
| | CAG GCT GGT TC | CATTTCTG (SEQ | +A+G+C CCAT | +G+GC CCA |
| | (SEQ ID NO: | ID NO: 364118) | (SEQ ID NO: | (SEQ ID NO: |
| | 364108) | | 364128) | 364138) |
| rs2070558 | CCAAGCCAGTCC | AAT GAC CAG | AGG GAC | AGG GAC |
| | CAGTAG (SEQ ID | ATC CAA ATG | +C+G+C TGA | +C+A+C +TGA |
| | NO: 364109) | AGG (SEQ ID NO: | (SEQ ID NO: | (SEQ ID NO: |
| | | 364119) | 364129) | 364139) |
| rs2070561 | TTG GCA AGG | GTC CCC TGG | CGG T+G+C | CGG TGC |
| | TTT CAG GTT TG | TCT CCC TGT C | +T+TC GTC C | +C+TC GTC C |
| | (SEQ ID NO: | (SEQ ID NO: | (SEQ ID NO: | (SEQ ID NO: |
| | 364110) | 364120) | 364130) | 364140) |
| rs56124762 | AAACAGGAACA | GCTCTGCCTTCA | +T+T+A | TAG T+T+A |
| | GGCTGGTTC | CATTTCTG (SEQ | +A+G+CCCAT' | +G+GC CCA |
| | (SEQ ID NO: | ID NO: 364145) | (SEQ ID NO: | (SEQ ID NO: |
| | 364141) | | 364149) | 364153) |
| rs16901748 | GATCTTGGGAAT | ACAACTGCCAG | CAT +TAA | CCA +T+TA |
| | CAGATAGGT | ACATATTTG | +A+G+T+CAG | AA+T |
| | (SEQ ID NO: | (SEQ ID NO: | A+GT (SEQ ID | T+CA+GA+GT |
| | 364142) | 364146) | NO: 364150) | (SEQ ID NO: |
| | | | | 364154) |
| rs12934476 | GAAATCAGGTTA | CCCACCAGCCCA | CAT +TAA | AT+TTAA+T+G |
| | GAAATACACACA | TGTTATT (SEQ | +A+G+T+CAG | +CTAA+C+GT |
| | TTA (SEQ ID NO: | ID NO: 364147) | A+GT (SEQ ID | (SEQ ID NO: |
| | 364143) | | NO: 364151) | 364155) |
| rs2297437 | CACCCCATTTCT | AGGATGCCGATT | ATT C+G+G | ATT C+A+G |
| | GCTTTCTG (SEQ | CTTCACA (SEQ | GT+G TGCTTG | GT+G TG+CTTG |
| | ID NO: 364144) | ID NO: 364148) | (SEQ ID NO: | (SEQ ID NO: |
| | | | 364152) | 364156) |

[0905] “Wt_Probe_Hex” and “Mut_Probe_FAM” mean “Wild type_probes_tagged with HEX reporter dye” and “Mut_probe_tagged with FAM reporter dye”, respectively. “+” stands for LNA bases (Locked nucleotides), which are analogues that are modified at 2′-O, 4′-C and form a bridge. This bridge results in restricted base pairing giving room to adjust the Tm as needed between the probes. Thus, +A, +T, +C or +G signify A, T, G or C bases are added on the modified backbone.

[0906] In some instances, qPCR comprises using an intercalating dye. Examples of intercalating dyes include SYBR green I, SYBR green II, SYBR gold, ethidium bromide, methylene blue, Pyronin Y, DAPI, acridine orange, Blue View or phycoerythrin. In some instances, the intercalating dye is SYBR.

[0907] In some instances, a number of amplification cycles for detecting a target nucleic acid in an amplification assay is about 5 to about 30 cycles. In some instances, the number of amplification cycles for detecting a target nucleic acid is at least about 5 cycles. In some instances, the number of amplification cycles for detecting a target nucleic acid is at most about 30 cycles. In some instances, the number of amplification cycles for detecting a target nucleic acid is about 5 to about 10, about 5 to about 15, about 5 to about 20, about 5 to about 25, about 5 to about 30, about 10 to about 15, about 10 to about 20, about 10 to about 25, about 10 to about 30, about 15 to about 20, about 15 to about 25, about 15 to about 30, about 20 to about 25, about 20 to about 30, or about 25 to about 30 cycles.

[0908] In one aspect, the methods provided herein for determining the presence, absence, and/or quantity of a nucleic acid sequence from a particular genotype comprise an amplification reaction such as qPCR. In an exemplary method, genetic material is obtained from a sample of a subject, e.g., a sample of blood or serum. In certain embodiments where nucleic acids are extracted, the nucleic acids are extracted using any technique that does not interfere with subsequent analysis. In certain embodiments, this technique uses alcohol precipitation using ethanol, methanol, or isopropyl alcohol. In certain embodiments, this technique uses phenol, chloroform, or any combination thereof. In certain embodiments, this technique uses cesium chloride. In certain embodiments, this technique uses sodium, potassium or ammonium acetate or any other salt commonly used to precipitate DNA. In certain embodiments, this technique utilizes a column or resin based nucleic acid purification scheme such as those commonly sold commercially, one non-limiting example would be the GenElute Bacterial Genomic DNA Kit available from Sigma Aldrich. In certain embodiments, after extraction the nucleic acid is stored in water, Tris buffer, or Tris-EDTA buffer before subsequent analysis. In an exemplary embodiment, the nucleic acid material is extracted in water. In some cases, extraction does not comprise nucleic acid purification.

[0909] In the exemplary qPCR assay, the nucleic acid sample is combined with primers and probes specific for a target nucleic acid that may or may not be present in the sample, and a DNA polymerase. An amplification reaction is performed with a thermal cycler that heats and cools the sample for nucleic acid amplification, and illuminates the sample at a specific wavelength to excite a fluorophore on the probe and detect the emitted fluorescence. For TagMan™ methods, the probe may be a hydrolysable probe comprising a fluorophore and quencher that is hydrolyzed by DNA polymerase when hybridized to a target nucleic acid. In some cases, the presence of a target nucleic acid is determined when the number of amplification cycles to reach a threshold value is less than 30, 29, 28, 27, 26, 25, 24, 23, 22, 21, or 20 cycles.

[0910] In some embodiments, the target nucleic acid is at least 10 contiguous nucleic acid molecules of SEQ ID NO: 2001 comprising a non-reference allele at nucleoposition 501 within SEQ ID NO: 2001. In some embodiments, the target nucleic acid is at least 10 contiguous nucleic acid molecules of SEQ ID NO: 2001 comprising a “G” or an “A” allele at nucleoposition 501 within SEQ ID NO: 2001. In some embodiments, detecting the at least 10 contiguous nucleic acid molecules comprising a “G” or an “A” allele at nucleoposition 501 within SEQ ID NO: 2001 is sufficient to detect the polymorphism at rs11897732.

[0911] In some embodiments, the target nucleic acid is at least 10 contiguous nucleic acid molecules of SEQ ID NO: 2002 comprising non-reference allele at nucleoposition 501 within SEQ ID NO: 2002. In some embodiments, the target nucleic acid is at least 10 contiguous nucleic acid molecules of SEQ ID NO: 2002 comprising an “A” or a “G” allele at nucleoposition 501 within SEQ ID NO: 2002. In some embodiments, detecting the at least 10 contiguous nucleic acid molecules comprising an “A” or a “G” allele at nucleoposition 501 within SEQ ID NO: 2002 is sufficient to detect the polymorphism at rs6740739.

[0912] In some embodiments, the target nucleic acid is at least 10 contiguous nucleic acid molecules of SEQ ID NO: 2003 comprising a non-reference allele at nucleoposition 501 within SEQ ID NO: 2003. In some embodiments, the target nucleic acid is at least 10 contiguous nucleic acid molecules of SEQ ID NO: 2003 comprising a “G” or a “C” allele at nucleoposition 501 within SEQ ID NO: 2003. In some embodiments, detecting the at least 10 contiguous nucleic acid molecules comprising a “G” or a “C” allele at nucleoposition 501 within SEQ ID NO: 2003 is sufficient to detect the polymorphism at rs17796285.

[0913] In some embodiments, the target nucleic acid is at least 10 contiguous nucleic acid molecules of SEQ ID NO: 2004 comprising a non-reference allele at nucleoposition 501 within SEQ ID NO: 2004. In some embodiments, the target nucleic acid is at least 10 contiguous nucleic acid molecules of SEQ ID NO: 2004 comprising a “C” or an “A” allele at nucleoposition 501 within SEQ ID NO: 2004. In some embodiments, detecting the at least 10 contiguous nucleic acid molecules comprising a “C” or an “A” allele at nucleoposition 501 within SEQ ID NO: 2004 is sufficient to detect the polymorphism at rs7935393.

[0914] In some embodiments, the target nucleic acid is at least 10 contiguous nucleic acid molecules of SEQ ID NO: 2005 comprising a non-reference allele at nucleoposition 501 within SEQ ID NO: 2005. In some embodiments, the target nucleic acid is at least 10 contiguous nucleic acid molecules of SEQ ID NO: 2005 comprising a “G” or an “A” allele at nucleoposition 501 within SEQ ID NO: 2005. In some embodiments, detecting the at least 10 contiguous nucleic acid molecules comprising a “G” of an “A” allele at nucleoposition 501 within SEQ ID NO: 2005 is sufficient to detect the polymorphism at rs12934476.

[0915] In some embodiments, the target nucleic acid is at least 10 contiguous nucleic acid molecules of SEQ ID NO: 2006 comprising a non-reference allele at nucleoposition 501 within SEQ ID NO: 2006. In some embodiments, the target nucleic acid is at least 10 contiguous nucleic acid molecules of SEQ ID NO: 2006 comprising an “A” or a “C” allele at nucleoposition 501 within SEQ ID NO: 2006. In some embodiments, detecting the at least 10 contiguous nucleic acid molecules comprising an “A” or a “C” allele at nucleoposition 501 within SEQ ID NO: 2006 is sufficient to detect the polymorphism at rs12457255.

[0916] In some embodiments, the target nucleic acid is at least 10 contiguous nucleic acid molecules of SEQ ID NO: 2007 comprising a non-reference allele at nucleoposition 501 within SEQ ID NO: 2007. In some embodiments, the target nucleic acid is at least 10 contiguous nucleic acid molecules of SEQ ID NO: 2007 comprising an “A” or a “T” allele at nucleoposition 501 within SEQ ID NO: 2007. In some embodiments, detecting the at least 10 contiguous nucleic acid molecules comprising an “A” or a “T” allele at nucleoposition 501 within SEQ ID NO: 2007 is sufficient to detect the polymorphism at rs2070557.

[0917] In some embodiments, the target nucleic acid is at least 10 contiguous nucleic acid molecules of SEQ ID NO: 2008 comprising a non-reference allele at nucleoposition 501 within SEQ ID NO: 2008. In some embodiments, the target nucleic acid is at least 10 contiguous nucleic acid molecules of SEQ ID NO: 2008 comprising an “A” or a “G” allele at nucleoposition 501 within SEQ ID NO: 2008. In some embodiments, detecting the at least 10 contiguous nucleic acid molecules comprising an “A” or “G” allele at nucleoposition 501 within SEQ ID NO: 2008 is sufficient to detect the polymorphism at rs4246905.

[0918] In some embodiments, the target nucleic acid is at least 10 contiguous nucleic acid molecules of SEQ ID NO: 2009 comprising a non-reference allele at nucleoposition 501 within SEQ ID NO: 2009. In some embodiments, the target nucleic acid is at least 10 contiguous nucleic acid molecules of SEQ ID NO: 2009 comprising an “A” or a “G” allele at nucleoposition 501 within SEQ ID NO: 2009. In some embodiments, detecting the at least 10 contiguous nucleic acid molecules comprising an “A” or a “G” allele at nucleoposition 501 within SEQ ID NO: 2009 is sufficient to detect the polymorphism at rs10974900.

[0919] In some embodiments, the target nucleic acid is at least 10 contiguous nucleic acid molecules of SEQ ID NO: 2010 comprising a non-reference allele at nucleoposition 501 within SEQ ID NO: 2010. In some embodiments, the target nucleic acid is at least 10 contiguous nucleic acid molecules of SEQ ID NO: 2010 comprising a “C” or an “A” allele at nucleoposition 501 within SEQ ID NO: 2010. In some embodiments, detecting the at least 10 contiguous nucleic acid molecules comprising a “C” or an “A” allele at nucleoposition 501 within SEQ ID NO: 2010 is sufficient to detect the polymorphism at rs12434976.

[0920] In some embodiments, the target nucleic acid is at least 10 contiguous nucleic acid molecules of SEQ ID NO: 20011 comprising a non-reference allele at nucleoposition 501 within SEQ ID NO: 20011. In some embodiments, the target nucleic acid is at least 10 contiguous nucleic acid molecules of SEQ ID NO: 20011 comprising an “A” or a “C” allele at nucleoposition 501 within SEQ ID NO: 20011. In some embodiments, detecting the at least 10 contiguous nucleic acid molecules comprising an “A” or a “C” allele at nucleoposition 501 within SEQ ID NO: 20011 is sufficient to detect the polymorphism at rs16901748.

[0921] In some embodiments, the target nucleic acid is at least 10 contiguous nucleic acid molecules of SEQ ID NO: 20012 comprising a non-reference allele at nucleoposition 501 within SEQ ID NO: 20012. In some embodiments, the target nucleic acid is at least 10 contiguous nucleic acid molecules of SEQ ID NO: 20012 comprising an “A” or a “G” allele at nucleoposition 501 within SEQ ID NO: 20012. In some embodiments, detecting the at least 10 contiguous nucleic acid molecules comprising an “A” or a “G” allele at nucleoposition 501 within SEQ ID NO: 20012 is sufficient to detect the polymorphism at rs2815844.

[0922] In some embodiments, the target nucleic acid is at least 10 contiguous nucleic acid molecules of SEQ ID NO: 20013 comprising a non-reference allele at nucleoposition 501 within SEQ ID NO: 20013. In some embodiments, the target nucleic acid is at least 10 contiguous nucleic acid molecules of SEQ ID NO: 20013 comprising a “G” or an “A” allele at nucleoposition 501 within SEQ ID NO: 20013. In some embodiments, detecting the at least 10 contiguous nucleic acid molecules comprising a “G” or an “A” allele at nucleoposition 501 within SEQ ID NO: 2013 is sufficient to detect the polymorphism at rs889702.

[0923] In some embodiments, the target nucleic acid is at least 10 contiguous nucleic acid molecules of SEQ ID NO: 20014 comprising a non-reference allele at nucleoposition 501 within SEQ ID NO: 20014. In some embodiments, the target nucleic acid is at least 10 contiguous nucleic acid molecules of SEQ ID NO: 20014 comprising a “C” or an “A” allele at nucleoposition 501 within SEQ ID NO: 20014. In some embodiments, detecting the at least 10 contiguous nucleic acid molecules comprising a “C” or an “A” allele at nucleoposition 501 within SEQ ID NO: 20014 is sufficient to detect the polymorphism at rs2409750.

[0924] In some embodiments, the target nucleic acid is at least 10 contiguous nucleic acid molecules of SEQ ID NO: 20015 comprising a non-reference allele at nucleoposition 501 within SEQ ID NO: 20015. In some embodiments, the target nucleic acid is at least 10 contiguous nucleic acid molecules of SEQ ID NO: 20015 comprising an “A” or a “G” allele at nucleoposition 501 within SEQ ID NO: 20015. In some embodiments, detecting the at least 10 contiguous nucleic acid molecules comprising an “A” or “G” allele at nucleoposition 501 within SEQ ID NO: 2015 is sufficient to detect the polymorphism at rs1541020.

[0925] In some embodiments, the target nucleic acid is at least 10 contiguous nucleic acid molecules of SEQ ID NO: 20016 comprising a non-reference allele at nucleoposition 501 within SEQ ID NO: 20016. In some embodiments, the target nucleic acid is at least 10 contiguous nucleic acid molecules of SEQ ID NO: 20016 comprising a “T” or an “A” allele at nucleoposition 501 within SEQ ID NO: 2016. In some embodiments, detecting the at least 10 contiguous nucleic acid molecules comprising a “T” or an “A” allele at nucleoposition 501 within SEQ ID NO: 20016 is sufficient to detect the polymorphism at rs4942248.

[0926] In some embodiments, the target nucleic acid is at least 10 contiguous nucleic acid molecules of SEQ ID NO: 20017 comprising a non-reference allele at nucleoposition 501 within SEQ ID NO: 20017. In some embodiments, the target nucleic acid is at least 10 contiguous nucleic acid molecules of SEQ ID NO: 20017 comprising a “G” or an “A” allele at nucleoposition 501 within SEQ ID NO: 20017. In some embodiments, detecting the at least 10 contiguous nucleic acid molecules comprising a “G” or an “A” allele at nucleoposition 501 within SEQ ID NO: 20017 is sufficient to detect the polymorphism at rs12934476.

[0927] In some embodiments, the target nucleic acid is at least 10 contiguous nucleic acid molecules of SEQ ID NO: 20018 comprising a non-reference allele at nucleoposition 501 within SEQ ID NO: 20018. In some embodiments, the target nucleic acid is at least 10 contiguous nucleic acid molecules of SEQ ID NO: 20018 comprising an “A” or a “C” allele at nucleoposition 501 within SEQ ID NO: 20018. In some embodiments, detecting the at least 10 contiguous nucleic acid molecules comprising an “A” or a “C” allele at nucleoposition 501 within SEQ ID NO: 20018 is sufficient to detect the polymorphism at rs12457255.

[0928] In some embodiments, the target nucleic acid is at least 10 contiguous nucleic acid molecules of SEQ ID NO: 20019 comprising a non-reference allele at nucleoposition 501 within SEQ ID NO: 20019. In some embodiments, the target nucleic acid is at least 10 contiguous nucleic acid molecules of SEQ ID NO: 20019 comprising an “A” or a “G” allele at nucleoposition 501 within SEQ ID NO: 20019. In some embodiments, detecting the at least 10 contiguous nucleic acid molecules comprising an “A” or a “G” allele at nucleoposition 501 within SEQ ID NO: 20019 is sufficient to detect the polymorphism at rs2297437.

[0929] In some embodiments, the target nucleic acid is at least 10 contiguous nucleic acid molecules of SEQ ID NO: 20020 comprising a non-reference allele at nucleoposition 501 within SEQ ID NO: 20020. In some embodiments, the target nucleic acid is at least 10 contiguous nucleic acid molecules of SEQ ID NO: 20020 comprising a “G” or an “A” allele at nucleoposition 501 within SEQ ID NO: 20020. In some embodiments, detecting the at least 10 contiguous nucleic acid molecules comprising a “G” or an “A” allele at nucleoposition 501 within SEQ ID NO: 20020 is sufficient to detect the polymorphism at rs41309367.

[0930] In some embodiments, the target nucleic acid is at least 10 contiguous nucleic acid molecules of SEQ ID NO: 20021 comprising a non-reference allele at nucleoposition 501 within SEQ ID NO: 20021. In some embodiments, the target nucleic acid is at least 10 contiguous nucleic acid molecules of SEQ ID NO: 20021 comprising an “A” or a “G” allele at nucleoposition 501 within SEQ ID NO: 2021. In some embodiments, detecting the at least 10 contiguous nucleic acid molecules comprising an “A” or a “G” allele at nucleoposition 501 within SEQ ID NO: 20021 is sufficient to detect the polymorphism at rs10733509.

[0931] In some embodiments, the target nucleic acid is at least 10 contiguous nucleic acid molecules of SEQ ID NO: 20022 comprising a non-reference allele at nucleoposition 501 within SEQ ID NO: 20022. In some embodiments, the target nucleic acid is at least 10 contiguous nucleic acid molecules of SEQ ID NO: 20022 comprising a “G” or an “A” allele at nucleoposition 501 within SEQ ID NO: 20022. In some embodiments, detecting the at least 10 contiguous nucleic acid molecules comprising a “G” or an “A” allele at nucleoposition 501 within SEQ ID NO: 20022 is sufficient to detect the polymorphism at rs10750376.

[0932] In some embodiments, the target nucleic acid is at least 10 contiguous nucleic acid molecules of SEQ ID NO: 20023 comprising a non-reference allele at nucleoposition 501 within SEQ ID NO: 20023. In some embodiments, the target nucleic acid is at least 10 contiguous nucleic acid molecules of SEQ ID NO: 20023 comprising a “G” or an “A” allele at nucleoposition 501 within SEQ ID NO: 20023. In some embodiments, detecting the at least 10 contiguous nucleic acid molecules comprising a “G” or an “A” allele at nucleoposition 501 within SEQ ID NO: 20023 is sufficient to detect the polymorphism at rs10932456.

[0933] In some embodiments, the target nucleic acid is at least 10 contiguous nucleic acid molecules of SEQ ID NO: 20024 comprising a non-reference allele at nucleoposition 501 within SEQ ID NO: 20024. In some embodiments, the target nucleic acid is at least 10 contiguous nucleic acid molecules of SEQ ID NO: 20024 comprising an “A” or a “G” allele at nucleoposition 501 within SEQ ID NO: 20024. In some embodiments, detecting the at least 10 contiguous nucleic acid molecules comprising an “A” or a “G” allele at nucleoposition 501 within SEQ ID NO: 20024 is sufficient to detect the polymorphism at rs1326860.

[0934] In some embodiments, the target nucleic acid is at least 10 contiguous nucleic acid molecules of SEQ ID NO: 20025 comprising a “G” or an “A” allele at nucleoposition 501 within SEQ ID NO: 20025. In some embodiments, detecting the at least 10 contiguous nucleic acid molecules comprising a “G” or an “A” allele at nucleoposition 501 within SEQ ID NO: 20025 is sufficient to detect the polymorphism at rs1528663.

[0935] In some embodiments, the target nucleic acid is at least 10 contiguous nucleic acid molecules of SEQ ID NO: 20026 comprising a non-reference allele at nucleoposition 501 within SEQ ID NO: 20026. In some embodiments, the target nucleic acid is at least 10 contiguous nucleic acid molecules of SEQ ID NO: 20026 comprising a “C” or an “A” allele at nucleoposition 501 within SEQ ID NO: 20026. In some embodiments, detecting the at least 10 contiguous nucleic acid molecules comprising a “C” or an “A” allele at nucleoposition 501 within SEQ ID NO: 20026 is sufficient to detect the polymorphism at rs1892231.

[0936] In some embodiments, the target nucleic acid is at least 10 contiguous nucleic acid molecules of SEQ ID NO: 20027 comprising a non-reference allele at nucleoposition 501 within SEQ ID NO: 20027. In some embodiments, the target nucleic acid is at least 10 contiguous nucleic acid molecules of SEQ ID NO: 20027 comprising a “G” or an “A” allele at nucleoposition 501 within SEQ ID NO: 20027. In some embodiments, detecting the at least 10 contiguous nucleic acid molecules comprising a “G” or an “A” allele at nucleoposition 501 within SEQ ID NO: 20027 is sufficient to detect the polymorphism at rs951279.

[0937] In some embodiments, the target nucleic acid is at least 10 contiguous nucleic acid molecules of SEQ ID NO: 20028 comprising a non-reference allele at nucleoposition 501 within SEQ ID NO: 20028. In some embodiments, the target nucleic acid is at least 10 contiguous nucleic acid molecules of SEQ ID NO: 20028 comprising an “A” or a “G” allele at nucleoposition 501 within SEQ ID NO: 20028. In some embodiments, detecting the at least 10 contiguous nucleic acid molecules comprising an “A” or a “G” allele at nucleoposition 501 within SEQ ID NO: 20028 is sufficient to detect the polymorphism at rs9806914.

[0938] In some embodiments, the target nucleic acid is at least 10 contiguous nucleic acid molecules of SEQ ID NO: 20029 comprising a non-reference allele at nucleoposition 501 within SEQ ID NO: 20029. In some embodiments, the target nucleic acid is at least 10 contiguous nucleic acid molecules of SEQ ID NO: 20029 comprising a “C” or an “A” allele at nucleoposition 501 within SEQ ID NO: 20029. In some embodiments, detecting the at least 10 contiguous nucleic acid molecules comprising a “C” or an “A” allele at nucleoposition 501 within SEQ ID NO: 20029 is sufficient to detect the polymorphism at rs7935393.

[0939] In some embodiments, the target nucleic acid is at least 10 contiguous nucleic acid molecules of SEQ ID NO: 20030 comprising a non-reference allele at nucleoposition 501 within SEQ ID NO: 20030. In some embodiments, the target nucleic acid is at least 10 contiguous nucleic acid molecules of SEQ ID NO: 20030 comprising a “G” or a “C” allele at nucleoposition 501 within SEQ ID NO: 20030. In some embodiments, detecting the at least 10 contiguous nucleic acid molecules comprising a “G” or a “C” allele at nucleoposition 501 within SEQ ID NO: 20030 is sufficient to detect the polymorphism at rs1690492.

[0940] In some embodiments, the target nucleic acid is at least 10 contiguous nucleic acid molecules of SEQ ID NO: 20031 comprising a non-reference allele at nucleoposition 501 within SEQ ID NO: 20031. In some embodiments, the target nucleic acid is at least 10 contiguous nucleic acid molecules of SEQ ID NO: 20031 comprising a “G” or an “A” allele at nucleoposition 501 within SEQ ID NO: 20031. In some embodiments, detecting the at least 10 contiguous nucleic acid molecules comprising a “G” or an “A” allele at nucleoposition 501 within SEQ ID NO: 20031 is sufficient to detect the polymorphism at rs420726.

[0941] In some embodiments, the target nucleic acid is at least 10 contiguous nucleic acid molecules of SEQ ID NO: 20032 comprising a non-reference allele at nucleoposition 501 within SEQ ID NO: 20032. In some embodiments, the target nucleic acid is at least 10 contiguous nucleic acid molecules of SEQ ID NO: 20032 comprising a “T” or an “A” allele at nucleoposition 501 within SEQ ID NO: 20032. In some embodiments, detecting the at least 10 contiguous nucleic acid molecules comprising a “T” of an “A” allele at nucleoposition 501 within SEQ ID NO: 20032 is sufficient to detect the polymorphism at rs7759385.

[0942] In some embodiments, the target nucleic acid is at least 10 contiguous nucleic acid molecules of SEQ ID NO: 20033 comprising a non-reference allele at nucleoposition 501 within SEQ ID NO: 20033. In some embodiments, the target nucleic acid is at least 10 contiguous nucleic acid molecules of SEQ ID NO: 20033 comprising an “A” or a “G” allele at nucleoposition 501 within SEQ ID NO: 20033. In some embodiments, detecting the at least 10 contiguous nucleic acid molecules comprising an “A” or a “G” allele at nucleoposition 501 within SEQ ID NO: 20033 is sufficient to detect the polymorphism at rs10974900.

[0943] In some embodiments, the target nucleic acid is at least 10 contiguous nucleic acid molecules of SEQ ID NO: 20034 comprising a non-reference allele at nucleoposition 501 within SEQ ID NO: 20034. In some embodiments, the target nucleic acid is at least 10 contiguous nucleic acid molecules of SEQ ID NO: 20034 comprising an “A” or a “G” allele at nucleoposition 501 within SEQ ID NO: 20034. In some embodiments, detecting the at least 10 contiguous nucleic acid molecules comprising an “A” or a “G” allele at nucleoposition 501 within SEQ ID NO: 20034 is sufficient to detect the polymorphism at rs1326860.

[0944] In some embodiments, the target nucleic acid is at least 10 contiguous nucleic acid molecules of SEQ ID NO: 20035 comprising a non-reference allele at nucleoposition 501 within SEQ ID NO: 2035. In some embodiments, the target nucleic acid is at least 10 contiguous nucleic acid molecules of SEQ ID NO: 20035 comprising a “C” or a “G” allele at nucleoposition 501 within SEQ ID NO: 20035. In some embodiments, detecting the at least 10 contiguous nucleic acid molecules comprising a “C” or a “G” allele at nucleoposition 501 within SEQ ID NO: 20035 is sufficient to detect the polymorphism at rs2548147.

[0945] In some embodiments, the target nucleic acid is at least 10 contiguous nucleic acid molecules of SEQ ID NO: 20036 comprising a non-reference allele at nucleoposition 501 within SEQ ID NO: 20036. In some embodiments, the target nucleic acid is at least 10 contiguous nucleic acid molecules of SEQ ID NO: 20036 comprising an “A” or a “G” allele at nucleoposition 501 within SEQ ID NO: 20036. In some embodiments, detecting the at least 10 contiguous nucleic acid molecules comprising an “A” of a “G” allele at nucleoposition 501 within SEQ ID NO: 20036 is sufficient to detect the polymorphism at rs2815844.

[0946] In some embodiments, the target nucleic acid is at least 10 contiguous nucleic acid molecules of SEQ ID NO: 20037 comprising a non-reference allele at nucleoposition 501 within SEQ ID NO: 20037. In some embodiments, the target nucleic acid is at least 10 contiguous nucleic acid molecules of SEQ ID NO: 20037 comprising a “G” or an “A” allele at nucleoposition 501 within SEQ ID NO: 20037. In some embodiments, detecting the at least 10 contiguous nucleic acid molecules comprising a “G” or an “A” allele at nucleoposition 501 within SEQ ID NO: 20037 is sufficient to detect the polymorphism at rs889702.

[0947] In some embodiments, the target nucleic acid is at least 10 contiguous nucleic acid molecules of SEQ ID NO: 20038 comprising a non-reference allele at nucleoposition 501 within SEQ ID NO: 20038. In some embodiments, the target nucleic acid is at least 10 contiguous nucleic acid molecules of SEQ ID NO: 20038 comprising an “A” or a “G” allele at nucleoposition 501 within SEQ ID NO: 20038. In some embodiments, detecting the at least 10 contiguous nucleic acid molecules comprising an “A” or a “G” allele at nucleoposition 501 within SEQ ID NO: 20038 is sufficient to detect the polymorphism at rs9806914.

[0948] In some embodiments, the target nucleic acid is at least 10 contiguous nucleic acid molecules of SEQ ID NO: 20039 comprising a non-reference allele at nucleoposition 501 within SEQ ID NO: 20039. In some embodiments, the target nucleic acid is at least 10 contiguous nucleic acid molecules of SEQ ID NO: 20039 comprising an “A” or a “G” allele at nucleoposition 501 within SEQ ID NO: 20039. In some embodiments, detecting the at least 10 contiguous nucleic acid molecules comprising an “A” or a “G” allele at nucleoposition 501 within SEQ ID NO: 20039 is sufficient to detect the polymorphism at rs6478109.

[0949] In some embodiments, the target nucleic acid is at least 10 contiguous nucleic acid molecules of SEQ ID NO: 20040 comprising a non-reference allele at nucleoposition 501 within SEQ ID NO: 20040. In some embodiments, the target nucleic acid is at least 10 contiguous nucleic acid molecules of SEQ ID NO: 20040 comprising a “C” or a “G” allele at nucleoposition 501 within SEQ ID NO: 20040. In some embodiments, detecting the at least 10 contiguous nucleic acid molecules comprising a “C” or a “G” allele at nucleoposition 501 within SEQ ID NO: 2040 is sufficient to detect the polymorphism at rs7278257.

[0950] In some embodiments, the target nucleic acid is at least 10 contiguous nucleic acid molecules of SEQ ID NO: 20041 comprising a non-reference allele at nucleoposition 501 within SEQ ID NO: 20041. In some embodiments, the target nucleic acid is at least 10 contiguous nucleic acid molecules of SEQ ID NO: 20041 comprising an “A” or a “G” allele at nucleoposition 501 within SEQ ID NO: 20041. In some embodiments, detecting the at least 10 contiguous nucleic acid molecules comprising an “A” or a “G” allele at nucleoposition 501 within SEQ ID NO: 20041 is sufficient to detect the polymorphism at rs11221332.

[0951] In some embodiments, the target nucleic acid is at least 10 contiguous nucleic acid molecules of SEQ ID NO: 20057 comprising a non-reference allele at nucleoposition 501 within SEQ ID NO: 20057. In some embodiments, the target nucleic acid is at least 10 contiguous nucleic acid molecules of SEQ ID NO: 20057 comprising an “A” or a “G” allele at nucleoposition 501 within SEQ ID NO: 20057. In some embodiments, detecting the at least 10 contiguous nucleic acid molecules comprising an “A” or a “G” allele at nucleoposition 501 within SEQ ID NO: 20057 is sufficient to detect the polymorphism at rs56124762.

[0952] In some embodiments, the target nucleic acid is at least 10 contiguous nucleic acid molecules of SEQ ID NO: 20058 comprising a non-reference allele at nucleoposition 501 within SEQ ID NO: 20058. In some embodiments, the target nucleic acid is at least 10 contiguous nucleic acid molecules of SEQ ID NO: 20058 comprising an “A” or a “G” allele at nucleoposition 501 within SEQ ID NO: 20058. In some embodiments, detecting the at least 10 contiguous nucleic acid molecules comprising an “A” or a “G” allele at nucleoposition 501 within SEQ ID NO: 20058 is sufficient to detect the polymorphism at rs2070558.

[0953] In some embodiments, the target nucleic acid is at least 10 contiguous nucleic acid molecules of SEQ ID NO: 20059 comprising a non-reference allele at nucleoposition 501 within SEQ ID NO: 20059. In some embodiments, the target nucleic acid is at least 10 contiguous nucleic acid molecules of SEQ ID NO: 20059 comprising an “T” or a “C” allele at nucleoposition 501 within SEQ ID NO: 20059. In some embodiments, detecting the at least 10 contiguous nucleic acid molecules comprising an “T” or a “C” allele at nucleoposition 501 within SEQ ID NO: 20059 is sufficient to detect the polymorphism at rs2070561.

[0954] In some embodiments, one target nucleic acid (e.g., a polymorphism) is detected with the methods disclosed herein. In some embodiments, at least 2, 3, 4, 5, 6, 7, 8, 9, or 10 target nucleic acids are detected. In some embodiments, the at least 2, 3, 4, 5, 6, 7, 8, 9, or 10 target nucleic acids are detected in a single multiplexed assay. In some embodiments, when 4 target nucleic acids are detected in a sample from subject, 4 unique 3-polymorphism combinations are measured. In a non-limiting example, a sample (e.g., blood or plasma) obtained from a subject is contacted by 4 primer pairs, each primer pair individually adapted to amplify rs6487109, rs56124762, rs1892231, and rs16901748, respectively. A positive, negative, or indeterminate TNFSF15 profile may depend, at least in part, on which of the 3 polymorphism combinations is detected in the sample, and/or whether the genotype is heterozygous or homozygous for the polymorphism. In this example, assaying 4 polymorphism means a total of 4 unique 3-polymorphisms may be detected in the patient sample, which are rs6478109, rs56124762, rs1892231; rs6478109, rs56124762, rs16901748; r s6478109, rs1892231, rs16901748; and rs56124762, rs1892231, rs16901748. Each polymorphism detected may be heterozygous or homozygous.

[0955] Disclosed herein, in some aspects are methods of sample preparation, the methods comprising: (a) extracting a plurality of nucleic acids from a sample disclosed herein that has been obtained from a subject; and (b) enriching a target nucleic acid from the plurality of nucleic acids comprising one or more polymorphisms disclosed herein, wherein the enriching is performed by (i) brining a fluid reaction formulation comprising a synthetic oligonucleotide molecule in contact with the sample; (ii) hybridizing the synthetic oligonucleotide molecule and the target nucleic acid molecule; and (iii) amplifying the target nucleic acid molecule, thereby enriching the target nucleic acid molecule in the fluid reaction formulation. In some embodiments, the methods further comprise detecting the target nucleic acid molecule that was enriched in (b). In some embodiments, the target nucleic acid comprises a TNFSF15 gene locus. In some embodiments, the one or more polymorphisms comprises a polymorphism provided in Table 1. In some embodiments, the one or more polymorphisms comprises a combination of at least 2, 3, 4, 5, 6, 7, 8, 9, 10, or more polymorphisms provided in Table 1. In some embodiments, the synthetic oligonucleotide comprises a primer sequence. In some embodiments, the synthetic oligonucleotide comprises a detectable probe.

[0956] To practice the methods and systems provided herein, genetic material may be extracted from a sample obtained from a subject, e.g., a sample of blood or serum. In certain embodiments where nucleic acids are extracted, the nucleic acids are extracted using any technique that does not interfere with subsequent analysis. In certain embodiments, this technique uses alcohol precipitation using ethanol, methanol or isopropyl alcohol. In certain embodiments, this technique uses phenol, chloroform, or any combination thereof. In certain embodiments, this technique uses cesium chloride. In certain embodiments, this technique uses sodium, potassium or ammonium acetate or any other salt commonly used to precipitate DNA. In certain embodiments, this technique utilizes a column or resin based nucleic acid purification scheme such as those commonly sold commercially, one non-limiting example would be the GenElute Bacterial Genomic DNA Kit available from Sigma Aldrich. In certain embodiments, after extraction the nucleic acid is stored in water, Tris buffer, or Tris-EDTA buffer before subsequent analysis. In an exemplary embodiment, the nucleic acid material is extracted in water. In some cases, extraction does not comprise nucleic acid purification. In certain embodiments, RNA may be extracted from cells using RNA extraction techniques including, for example, using acid phenol/guanidine isothiocyanate extraction (RNAzol B; Biogenesis), RNeasy RNA preparation kits (Qiagen) or PAXgene (PreAnalytix, Switzerland).

[0957] In some embodiments, methods of detecting a presence, absence, or level of a target protein (e.g., biomarker) in the sample obtained from the subject involve detecting protein activity or expression. In some embodiments, the target protein is TL1A, or a binding partner of TL1A such as Death Domain Receptor 3 (DcR3). A target protein may be detected by use of an antibody-based assay, where an antibody specific to the target protein is utilized. In some embodiments, antibody-based detection methods utilize an antibody that binds to any region of target protein. An exemplary method of analysis comprises performing an enzyme-linked immunosorbent assay (ELISA). The ELISA assay may be a sandwich ELISA or a direct ELISA. Another exemplary method of analysis comprises a single molecule array, e.g., Simoa. Other exemplary methods of detection include immunohistochemistry and lateral flow assay. Additional exemplary methods for detecting target protein include, but are not limited to, gel electrophoresis, capillary electrophoresis, high performance liquid chromatography (HPLC), thin layer chromatography (TLC), hyperdiffusion chromatography, and the like, or various immunological methods such as fluid or gel precipitation reactions, immunodiffusion (single or double), immunoelectrophoresis, radioimmunoassay (MA), immunofluorescent assays, and Western blotting. In some embodiments, antibodies, or antibody fragments, are used in methods such as Western blots or immunofluorescence techniques to detect the expressed proteins. The antibody or protein can be immobilized on a solid support for Western blots and immunofluorescence techniques. Suitable solid phase supports or carriers include any support capable of binding an antigen or an antibody. Exemplary supports or carriers include glass, polystyrene, polypropylene, polyethylene, dextran, nylon, amylases, natural and modified celluloses, polyacrylamides, gabbros, and magnetite.

[0958] In some cases, a target protein may be detected by detecting binding between the target protein and a binding partner of the target protein. Non-limiting examples of binding partners to TL1A include DcR3, and Tumor necrosis factor receptor superfamily member 25 (TNR25). Exemplary methods of analysis of protein-protein binding comprise performing an assay in vivo or in vitro, or ex vivo. In some instances, the method of analysis comprises an assay such as a co-immunoprecipitation (co-IP), pull-down, crosslinking protein interaction analysis, labeled transfer protein interaction analysis, or Far-western blot analysis, FRET based assay, including, for example FRET-FLIM, a yeast two-hybrid assay, BiFC, or split luciferase assay.

[0959] Disclosed herein are methods of detecting a presence or a level of one or more serological markers in a sample obtained from a subject. In some embodiments, the one or more serological markers comprises anti-Saccharomyces cerevisiae antibody (ASCA), an anti-neutrophil cytoplasmic antibody (ANCA), antibody against E. coli outer membrane porin protein C (anti-OmpC), anti-chitin antibody, pANCA antibody, anti-I2 antibody, and anti-Cbir1 flagellin antibody. In some embodiments, the antibodies comprises immunoglobulin A (IgA), immunoglobulin G (IgG), immunoglobulin E (IgE), or immunoglobulin M (IgM), immunoglobulin D (IgD), or a combination thereof. Any suitable method for detecting a target protein or biomarker disclosed herein may be used to detect a presence, absence, or level of a serological marker. In some embodiments, the presence or the level of the one or more serological markers is detected using an enzyme-linked immunosorbent assay (ELISA), a single molecule array (Simoa), immunohistochemistry, internal transcribed spacer (ITS) sequencing, or any combination thereof. In some embodiments, the ELISA is a fixed leukocyte ELISA. In some embodiments, the ELISA is a fixed neutrophil ELISA. A fixed leukocyte or neutrophil ELISA may be useful for the detection of certain serological markers, such as those described in Saxon et al., A distinct subset of antineutrophil cytoplasmic antibodies is associated with inflammatory bowel disease, J. Allergy Clin. Immuno. 86:2; 202-210 (August 1990). In some embodiments, ELISA units (EU) are used to measure positivity of a presence or level of a serological marker (e.g., seropositivity), which reflects a percentage of a standard or reference value. In some embodiments, the standard comprises pooled sera obtained from well-characterized patient population (e.g., diagnosed with the same disease or condition the subject has, or is suspected of having) reported as being seropositive for the serological marker of interest. In some embodiments, the control or reference value comprises 10, 20, 30, 40, 50, 60, 70, 80, 90, or 100 EU. In some instances, a quartile sum scores are calculated using, for example, the methods reported in Landers C J, Cohavy O, Misra R. et al., Selected loss of tolerance evidenced by Crohn's disease-associated immune responses to auto- and microbial antigens. Gastroenterology (2002) 123:689-699. Therapeutic agents

### Antibodies

[0960] In one aspect, provided herein are antibodies and antigen-binding fragments. In some embodiments, an antibody comprises an antigen-binding fragment that refers to a portion of an antibody having antigenic determining variable regions of an antibody. Examples of antigen-binding fragments include, but are not limited to, Fab, Fab′, F(ab′)₂, and Fv fragments, linear antibodies, single chain antibodies, and multispecific antibodies formed from antibody fragments. In some embodiments, an antibody refers to an immunoglobulin molecule that recognizes and specifically binds to a target, such as a protein, polypeptide, peptide, carbohydrate, polynucleotide, lipid, or combinations of the foregoing through at least one antigen recognition site within the variable region of the immunoglobulin molecule. In some embodiments, an antibody includes intact polyclonal antibodies, intact monoclonal antibodies, antibody fragments (such as Fab, Fab′, F(ab′)₂, and Fv fragments), single chain Fv (scFv) mutants, a CDR-grafted antibody, multispecific antibodies, chimeric antibodies, humanized antibodies, human antibodies, fusion proteins comprising an antigen determination portion of an antibody, and any other modified immunoglobulin molecule comprising an antigen recognition site so long as the antibodies exhibit the desired biological activity. An antibody can be of any the five major classes of immunoglobulins: IgA, IgD, IgE, IgG, and IgM, or subclasses (isotypes) thereof (e.g. IgG1, IgG2, IgG3, IgG4, IgA1 and IgA2), based on the identity of their heavy-chain constant domains referred to as alpha, delta, epsilon, gamma, and mu, respectively. The different classes of immunoglobulins have different and well-known subunit structures and three-dimensional configurations. Antibodies can be naked or conjugated to other molecules such as toxins, radioisotopes, etc.

[0961] In some embodiments, a humanized antibody refers to forms of non-human (e.g., murine) antibodies having specific immunoglobulin chains, chimeric immunoglobulins, or fragments thereof that contain minimal non-human (e.g., murine) sequences. In a non-limiting example, a humanized antibody comprises less than about 40% non-human sequence in the variable region. In some cases, a humanized antibody comprises less than about 20% non-human sequence in a full-length antibody sequence. In a further non-limiting example, a humanized antibody comprises less than about 20% non-human sequence in the framework region of each of the heavy chain and light chain variable regions. For instance, the humanized antibody comprises less than about 20%, 19%, 18%, 17%, 16%, 15%, 14%, 13%, 12%, 11%, 10%, 9%, 8%, 7%, 6%, 5%, 4%, 3%, 2%, or 1% non-human sequence in the framework region of each of the heavy chain and light chain variable regions. As another example, the humanized antibody comprises about or less than about 15, 14, 13, 12, 11, 10, 9, 8, 7, 6, 5, 4, 3, 2, or 1 non-human sequences in the framework region of each of the heavy chain and light chain variable regions. In some cases, humanized antibodies are human immunoglobulins in which residues from the complementarity determining region (CDR) are replaced by residues from the CDR of a non-human species (e.g., mouse, rat, rabbit, hamster) that have the desired specificity, affinity, and capability. These humanized antibodies may contain one or more non-human species mutations, e.g., the heavy chain comprises about 1, 2, 3, 4, 5, 6, 7, 8, 9, 10, 11, 12, 13, 14, or 15 non-human species mutations in the framework region, and the light chain comprises about 1, 2, 3, 4, 5, 6, 7, 8, 9, 10, 11, 12, 13, 14, or 15 non-human species mutations in the framework region. The humanized heavy chain variable domain may comprise IGHV1-46*02 framework with no or fewer than about 10, 9, 8, 7, 6, 5, 4, 3, 2, or 1 amino acid mutations. The humanized light chain variable domain may comprise IGKV3-20 framework with no or fewer than about 10, 9, 8, 7, 6, 5, 4, 3, 2, or 1 amino acid mutations.

[0962] In some embodiments, chimeric antibodies refer to antibodies wherein the sequence of the immunoglobulin molecule is derived from two or more species. As a non limiting example, the variable region of both light and heavy chains corresponds to the variable region of antibodies derived from one species of mammals (e.g., mouse, rat, rabbit, etc.) with the desired specificity, affinity, and capability while the constant regions are homologous to the sequences in antibodies derived from another (usually human) to avoid eliciting an immune response in that species.

[0963] In certain aspects, antibodies are described herein that specifically bind to TL1A (Entrez Gene: 9966; UniProtKB: 095150). In some embodiments, the antibodies specifically bind to soluble TL1A. In some embodiments, the antibodies specifically bind to membrane bound TL1A. In some embodiments, an anti-TL1A antibody is provided having a heavy chain comprising four heavy chain framework regions (HCFR) and three heavy chain complementarity-determining regions (HCDR): HCFR1, HCDR1, HCFR2, HCDR2, HCFR3, HCDR3, and HCFR4; and a light chain comprising four light chain framework regions (LCFR) and three light chain complementarity-determining regions (LCDR): LCFR1, LCDR1, LCFR2, LCDR2, LCFR3, LCDR3, and LCFR4. An anti-TL1A antibody may comprise any region provided herein, for example, as provided in Tables 15-21, the examples, and the sequences.

### Exemplary Anti-TL1A CDRs

[0964] In certain embodiments, an anti-TL1A antibody comprises a HCDR1 as set forth by any one of SEQ ID NOS: 1 or 601-722. In certain embodiments, an anti-TL1A antibody comprises a HCDR2 as set forth by any one of SEQ ID NOS: 2-5 or 723-787. In certain embodiments, an anti-TL1A antibody comprises a HCDR3 as set forth by any one of SEQ ID NOS: 6-9 or 788-842. In certain embodiments, an anti-TL1A antibody comprises a LCDR1 as set forth by any one of SEQ ID NOS: 10 or 843-865. In certain embodiments, an anti-TL1A antibody comprises a LCDR2 as set forth by any one of SEQ ID NOS: 11 or 866-885. In certain embodiments, an anti-TL1A antibody comprises a LCDR3 as set forth by any one of SEQ ID NOS: 12-15 or 886-1101.

[0965] In one aspect, provided herein are anti-TL1A antibodies having a HCDR1 comprising any one of SEQ ID NOS: 1 or 601-708, a HCDR2 comprising any one of SEQ ID NOS: 2-5 or 723-774, a HCDR3 comprising any one of SEQ ID NOS: 6-9 or 788-828, a LCDR1 comprising any one of SEQ ID NOS: 10 or 843-852, a LCDR2 comprising any one of SEQ ID NOS: 11 or 866-873, and a LCDR3 comprising any one of SEQ ID NOS: 12-15 or 886-1089.

[0966] In one aspect, provided herein are anti-TL1A antibodies having a HCDR1 comprising SEQ ID NO: 709, a HCDR2 comprising SEQ ID NO: 775, a HCDR3 comprising SEQ ID NO: 829, a LCDR1 comprising SEQ ID NO: 853, a LCDR2 comprising SEQ ID NO: 874, and a LCDR3 comprising SEQ ID NO: 1090.

[0967] In one aspect, provided herein are anti-TL1A antibodies having a HCDR1 comprising SEQ ID NO: 710, a HCDR2 comprising SEQ ID NO: 776, a HCDR3 comprising SEQ ID NO: 830, a LCDR1 comprising SEQ ID NO: 854, a LCDR2 comprising SEQ ID NO: 875, and a LCDR3 comprising SEQ ID NO: 1091. In one aspect, provided herein are anti-TL1A antibodies having a HCDR1 comprising SEQ ID NO: 711 or 712, a HCDR2 comprising SEQ ID NO: 777 or 778, a HCDR3 comprising SEQ ID NO: 831 or 832, a LCDR1 comprising SEQ ID NO: 855, a LCDR2 comprising SEQ ID NO: 876, and a LCDR3 comprising SEQ ID NO: 1092.

[0968] In one aspect, provided herein are anti-TL1A antibodies having a HCDR1 comprising SEQ ID NO: 713, a HCDR2 comprising SEQ ID NO: 779, a HCDR3 comprising SEQ ID NO: 833, a LCDR1 comprising SEQ ID NO: 856, a LCDR2 comprising SEQ ID NO: 877, and a LCDR3 comprising SEQ ID NO: 1093.

[0969] In one aspect, provided herein are anti-TL1A antibodies having a HCDR1 comprising SEQ ID NO: 714, a HCDR2 comprising SEQ ID NO: 780, a HCDR3 comprising SEQ ID NO: 834, a LCDR1 comprising SEQ ID NO: 857, a LCDR2 comprising SEQ ID NO: 878, and a LCDR3 comprising SEQ ID NO: 1094.

[0970] In one aspect, provided herein are anti-TL1A antibodies having a HCDR1 comprising SEQ ID NO: 715 or 716, a HCDR2 comprising SEQ ID NO: 781, a HCDR3 comprising SEQ ID NO: 835 or 836, a LCDR1 comprising SEQ ID NO: 858 or 859, a LCDR2 comprising SEQ ID NO: 879, and a LCDR3 comprising SEQ ID NO: 1095.

[0971] In one aspect, provided herein are anti-TL1A antibodies having a HCDR1 comprising SEQ ID NO: 717, a HCDR2 comprising SEQ ID NO: 782, a HCDR3 comprising SEQ ID NO: 837, a LCDR1 comprising SEQ ID NO: 860, a LCDR2 comprising SEQ ID NO: 880, and a LCDR3 comprising SEQ ID NO: 1096.

[0972] In one aspect, provided herein are anti-TL1A antibodies having a HCDR1 comprising SEQ ID NO: 718, a HCDR2 comprising SEQ ID NO: 783, a HCDR3 comprising SEQ ID NO: 838, a LCDR1 comprising SEQ ID NO: 861, a LCDR2 comprising SEQ ID NO: 881, and a LCDR3 comprising SEQ ID NO: 1097.

[0973] In one aspect, provided herein are anti-TL1A antibodies having a HCDR1 comprising SEQ ID NO: 719, a HCDR2 comprising SEQ ID NO: 784, a HCDR3 comprising SEQ ID NO: 839, a LCDR1 comprising SEQ ID NO: 862, a LCDR2 comprising SEQ ID NO: 882, and a LCDR3 comprising SEQ ID NO: 1098.

[0974] In one aspect, provided herein are anti-TL1A antibodies having a HCDR1 comprising SEQ ID NO: 720, a HCDR2 comprising SEQ ID NO: 785, a HCDR3 comprising SEQ ID NO: 840, a LCDR1 comprising SEQ ID NO: 863, a LCDR2 comprising SEQ ID NO: 883, and a LCDR3 comprising SEQ ID NO: 1099.

[0975] In one aspect, provided herein are anti-TL1A antibodies having a HCDR1 comprising SEQ ID NO: 721, a HCDR2 comprising SEQ ID NO: 786, a HCDR3 comprising SEQ ID NO: 841, a LCDR1 comprising SEQ ID NO: 864, a LCDR2 comprising SEQ ID NO: 884, and a LCDR3 comprising SEQ ID NO: 1100.

[0976] In one aspect, provided herein are anti-TL1A antibodies having a HCDR1 comprising SEQ ID NO: 722, a HCDR2 comprising SEQ ID NO: 787, a HCDR3 comprising SEQ ID NO: 842, a LCDR1 comprising SEQ ID NO: 865, a LCDR2 comprising SEQ ID NO: 885, and a LCDR3 comprising SEQ ID NO: 1101.

[0977] In certain embodiments, an anti-TL1A antibody comprises a HCDR1, HCDR2, HCDR3, LCDR1, LCDR2, LCDR3 selected from Table 15. In certain embodiments, an anti-TL1A antibody comprises the CDRs set forth in antibody A as shown in Table 20. In certain embodiments, an anti-TL1A antibody comprises the CDRs set forth in antibody B as shown in Table 20. In certain embodiments, an anti-TL1A antibody comprises the CDRs set forth in antibody C as shown in Table 20. In certain embodiments, an anti-TL1A antibody comprises the CDRs set forth in antibody D as shown in Table 20. In certain embodiments, an anti-TL1A antibody comprises the CDRs set forth in antibody E as shown in Table 20. In certain embodiments, an anti-TL1A antibody comprises the CDRs set forth in antibody F as shown in Table 20. In certain embodiments, an anti-TL1A antibody comprises the CDRs set forth in antibody Gas shown in Table 20. In certain embodiments, an anti-TL1A antibody comprises the CDRs set forth in antibody H as shown in Table 20. In certain embodiments, an anti-TL1A antibody comprises the CDRs set forth in antibody A2 as shown in Table 20. In certain embodiments, an anti-TL1A antibody comprises the CDRs set forth in antibody B2 as shown in Table 20. In certain embodiments, an anti-TL1A antibody comprises the CDRs set forth in antibody C2 as shown in Table 20. In certain embodiments, an anti-TL1A antibody comprises the CDRs set forth in antibody D2 as shown in Table 20. In certain embodiments, an anti-TL1A antibody comprises the CDRs set forth in antibody E2 as shown in Table 20. In certain embodiments, an anti-TL1A antibody comprises the CDRs set forth in antibody F2 as shown in Table 20. In certain embodiments, an anti-TL1A antibody comprises the CDRs set forth in antibody G2 as shown in Table 20. In certain embodiments, an anti-TL1A antibody comprises the CDRs set forth in antibody H2 as shown in Table 20. In certain embodiments, an anti-TL1A antibody comprises the CDRs set forth in antibody I as shown in Table 20. In certain embodiments, an anti-TL1A antibody comprises the CDRs set forth in antibody I2 as shown in Table 20. In certain embodiments, an anti-TL1A antibody comprises the CDRs set forth in antibody M1 as shown in Table 15. In certain embodiments, an anti-TL1A antibody comprises the CDRs set forth in antibody M2 as shown in Table 15. In certain embodiments, an anti-TL1A antibody comprises the CDRs set forth in antibody M3 as shown in Table 15. In certain embodiments, an anti-TL1A antibody comprises the CDRs set forth in antibody M4 as shown in Table 15. In certain embodiments, an anti-TL1A antibody comprises the CDRs set forth in antibody M5 as shown in Table 15. In certain embodiments, an anti-TL1A antibody comprises the CDRs set forth in antibody M6 as shown in Table 15. In certain embodiments, an anti-TL1A antibody comprises the CDRs set forth in antibody M7 as shown in Table 15. In certain embodiments, an anti-TL1A antibody comprises the CDRs set forth in antibody M8 as shown in Table 15. In certain embodiments, an anti-TL1A antibody comprises the CDRs set forth in antibody M9 as shown in Table 15. In certain embodiments, an anti-TL1A antibody comprises the CDRs set forth in antibody M10 as shown in Table 15. In certain embodiments, an anti-TL1A antibody comprises the CDRs set forth in antibody M11 as shown in Table 15. In certain embodiments, an anti-TL1A antibody comprises the CDRs set forth in antibody M12 as shown in Table 15. In certain embodiments, an anti-TL1A antibody comprises a P HCDR1 (any one of SEQ ID NOS: 1 or 601-708), a P HCDR2 (any one of SEQ ID NOS: 2-5 or 723-774), a P HCDR3 (any one of SEQ ID NOS: 6-9 or 788-828), a P LCDR1 (any one of SEQ ID NOS: 10 or 843-852), a P LCDR2 (any one of SEQ ID NOS: 11 or 866-873), and a P LCDR3 (any one of SEQ ID NOS: 12-15 or 886-1089) as shown in Table 15.

[0978] In certain embodiments, an anti-TL1A antibody comprises the CDRs set forth in any one of the antibodies in Table 10. In certain embodiments, an anti-TL1A antibody comprises the CDRs set forth in any one of the heavy chain variable regions in Table 16. In certain embodiments, an anti-TL1A antibody comprises the CDRs set forth in any one of the light chain variable regions in Table 17. The CDRs may be defined by the Aho or Kabat, Chothia, or IMGT method. In certain embodiments, an anti-TL1A antibody comprises the CDRs set forth in antibody A217. In certain embodiments, an anti-TL1A antibody comprises the CDRs set forth in antibody A220. In certain embodiments, an anti-TL1A antibody comprises the CDRs set forth in antibody A223. In certain embodiments, an anti-TL1A antibody comprises the CDRs set forth in antibody A219. In certain embodiments, an anti-TL1A antibody comprises the CDRs set forth in antibody A221. In certain embodiments, an anti-TL1A antibody comprises the CDRs set forth in antibody A200. In certain embodiments, an anti-TL1A antibody comprises the CDRs set forth in antibody A213. In certain embodiments, an anti-TL1A antibody comprises the CDRs set forth in antibody A212. In certain embodiments, an anti-TL1A antibody comprises the CDRs set forth in antibody A107. In certain embodiments, an anti-TL1A antibody comprises the CDRs set forth in antibody A205. In certain embodiments, an anti-TL1A antibody comprises the CDRs set forth in antibody A211. In certain embodiments, an anti-TL1A antibody comprises the CDRs set forth in antibody A199. In certain embodiments, an anti-TL1A antibody comprises the CDRs set forth in antibody A15. In certain embodiments, an anti-TL1A antibody comprises the CDRs set forth in antibody A30. In certain embodiments, an anti-TL1A antibody comprises the CDRs set forth in antibody A100. In certain embodiments, an anti-TL1A antibody comprises the CDRs set forth in antibody A181. In certain embodiments, an anti-TL1A antibody comprises the CDRs set forth in antibody A129. In certain embodiments, an anti-TL1A antibody comprises the CDRs set forth in antibody A214. In certain embodiments, an anti-TL1A antibody comprises the CDRs set forth in antibody A216. In certain embodiments, an anti-TL1A antibody comprises the CDRs set forth in antibody A122. In certain embodiments, an anti-TL1A antibody comprises the CDRs set forth in antibody A222. In certain embodiments, an anti-TL1A antibody comprises the CDRs set forth in antibody A188. In certain embodiments, an anti-TL1A antibody comprises the CDRs set forth in antibody A203. In certain embodiments, an anti-TL1A antibody comprises the CDRs set forth in antibody A147. In certain embodiments, an anti-TL1A antibody comprises the CDRs set forth in antibody A127. In certain embodiments, an anti-TL1A antibody comprises the CDRs set forth in antibody A126. In certain embodiments, an anti-TL1A antibody comprises the CDRs set forth in antibody A160. In certain embodiments, an anti-TL1A antibody comprises the CDRs set forth in antibody A157. In certain embodiments, an anti-TL1A antibody comprises the CDRs set forth in antibody A159. In certain embodiments, an anti-TL1A antibody comprises the CDRs set forth in antibody A218. In certain embodiments, an anti-TL1A antibody comprises the CDRs set forth in antibody A158. In certain embodiments, an anti-TL1A antibody comprises the CDRs set forth in antibody A125. In certain embodiments, an anti-TL1A antibody comprises the CDRs set forth in antibody A103. In certain embodiments, an anti-TL1A antibody comprises the CDRs set forth in antibody A64. In certain embodiments, an anti-TL1A antibody comprises the CDRs set forth in antibody A67. In certain embodiments, an anti-TL1A antibody comprises the CDRs set forth in antibody A138. In certain embodiments, an anti-TL1A antibody comprises the CDRs set forth in antibody A68. In certain embodiments, an anti-TL1A antibody comprises the CDRs set forth in antibody A94. In certain embodiments, an anti-TL1A antibody comprises the CDRs set forth in antibody A110. In certain embodiments, an anti-TL1A antibody comprises the CDRs set forth in antibody A197. In certain embodiments, an anti-TL1A antibody comprises the CDRs set forth in antibody A112. In certain embodiments, an anti-TL1A antibody comprises the CDRs set forth in antibody A169. In certain embodiments, an anti-TL1A antibody comprises the CDRs set forth in antibody A173. In certain embodiments, an anti-TL1A antibody comprises the CDRs set forth in antibody A179. In certain embodiments, an anti-TL1A antibody comprises the CDRs set forth in antibody A148. In certain embodiments, an anti-TL1A antibody comprises the CDRs set forth in antibody A115. In certain embodiments, an anti-TL1A antibody comprises the CDRs set forth in antibody A149. In certain embodiments, an anti-TL1A antibody comprises the CDRs set forth in antibody A134. In certain embodiments, an anti-TL1A antibody comprises the CDRs set forth in antibody A113. In certain embodiments, an anti-TL1A antibody comprises the CDRs set forth in antibody A151. In certain embodiments, an anti-TL1A antibody comprises the CDRs set forth in antibody A96. In certain embodiments, an anti-TL1A antibody comprises the CDRs set forth in antibody A132. In certain embodiments, an anti-TL1A antibody comprises the CDRs set forth in antibody A196. In certain embodiments, an anti-TL1A antibody comprises the CDRs set forth in antibody A172. In certain embodiments, an anti-TL1A antibody comprises the CDRs set forth in antibody A75. In certain embodiments, an anti-TL1A antibody comprises the CDRs set forth in antibody A174. In certain embodiments, an anti-TL1A antibody comprises the CDRs set forth in antibody A109. In certain embodiments, an anti-TL1A antibody comprises the CDRs set forth in antibody A198. In certain embodiments, an anti-TL1A antibody comprises the CDRs set forth in antibody A170. In certain embodiments, an anti-TL1A antibody comprises the CDRs set forth in antibody M1. In certain embodiments, an anti-TL1A antibody comprises the CDRs set forth in antibody M2. In certain embodiments, an anti-TL1A antibody comprises the CDRs set forth in antibody M3. In certain embodiments, an anti-TL1A antibody comprises the CDRs set forth in antibody M4. In certain embodiments, an anti-TL1A antibody comprises the CDRs set forth in antibody M5. In certain embodiments, an anti-TL1A antibody comprises the CDRs set forth in antibody M6. In certain embodiments, an anti-TL1A antibody comprises the CDRs set forth in antibody M7. In certain embodiments, an anti-TL1A antibody comprises the CDRs set forth in antibody M8. In certain embodiments, an anti-TL1A antibody comprises the CDRs set forth in antibody M9. In certain embodiments, an anti-TL1A antibody comprises the CDRs set forth in antibody M10. In certain embodiments, an anti-TL1A antibody comprises the CDRs set forth in antibody M11. In certain embodiments, an anti-TL1A antibody comprises the CDRs set forth in antibody M12.

### Exemplary Anti-TL1A Framework Regions

[0979] Tables 16-18 and Table 21 provides exemplary framework and variable region sequences. In some embodiments, an anti-TL1A antibody comprises a HC FR1 of Table 19 (SEQ ID NO: 304), a HC FR2 of Table 19 (any one of SEQ ID NOS: 305, 313, 1317), a HC FR3 of Table 19 (any one of SEQ ID NOS: 306, 307, 314, 315, 1318-1323), a HC FR4 of Table 19 (SEQ ID NO: 308), a LC FR1 of Table 19 (SEQ ID NO: 309), a LC FR2 of Table 19 (SEQ ID NO: 310 or 1324), a LC FR3 of Table 19 (SEQ ID NO: 311), and a LC FR4 of Table 19 (SEQ ID NO: 312).

[0980] In some embodiments, an anti-TL1A antibody comprises a heavy chain framework comprising SEQ ID NO: 301 (X1VQLVQSGAEVKKPGASVKVSCKAS[HCDR1]WVX2 QX3PGQGLEWX4G[HCDR2]RX5TX6TX7DTSTSTX8YX9ELSSLRSEDTAVYYCAR[HCDR3]WGQGTTVTVSS). In some cases, X1 is Q. In some cases, X1=E. In some cases, X2=R. In some cases, X2=K. In some cases, X3=A. In some cases, X3=R. In some cases, X4=M. In some cases, X4=I. In some cases, X5=V. In some cases, X5=A. In some cases, X6=M. In some cases, X6=I. In some cases, X7=R. In some cases, X7=T. In some cases, X8=V. In some cases, X8=A. In some cases, X9=M. In some cases, X9=L. In some embodiments, X1 is at position 1 of IGHV1-46*02 as determined by Aho or Kabat numbering. In some embodiments, X2 is at position 45 of IGHV1-46*02 as determined by Aho or Kabat numbering. In some embodiments, X3 is at position 47 of IGHV1-46*02 as determined by Aho or Kabat numbering. In some embodiments, X4 is at position 55 of IGHV1-46*02 as determined by Aho or Kabat numbering. In some embodiments, X5 is at position 78 of IGHV1-46*02 as determined by Aho or Kabat numbering. In some embodiments, X6 is at position 80 of IGHV1-46*02 as determined by Aho or Kabat numbering. In some embodiments, X7 is at position 82 of IGHV1-46*02 as determined by Aho or Kabat numbering. In some embodiments, X8 is at position 89 of IGHV1-46*02 as determined by Aho or Kabat numbering. In some embodiments, X9 is at position 91 of IGHV1-46*02 as determined by Aho or Kabat numbering.

[0981] In one aspect, provided herein is a first embodiment of an anti-TL1A antibody comprising a heavy chain framework comprising IGHV1-46*02, or a variant thereof, wherein the variant comprises between about 1 and about 9 amino acid substitutions, or between about 1 and about 20 amino acid substitutions, or about 1, 2, 3, 4, 5, 6, 7, 8, 9, 10, 11, 12, 13, 14, 15, 16, 17, 18, 19, or 20 amino acid substitutions from IGHV1-46*02 framework. Additional embodiments include: (2) The anti-TL1A of embodiment (1), wherein the heavy chain framework comprises SEQ ID NO: 301. (3) The anti-TL1A of embodiment 2, wherein X1=Q. (4) The anti-TL1A of embodiment 2, wherein X1=E. (5) The anti-TL1A of any one of embodiments 2-4, wherein X2=R. (6) The anti-TL1A of any one of embodiments 2-4, wherein X2=K. (7) The anti-TL1A of any one of embodiments 2-6, wherein X3=A. (8) The anti-TL1A of any one of embodiments 2-6, wherein X3=R. (9) The anti-TL1A of any one of embodiments 2-8, wherein X4=M. (10) The anti-TL1A of any one of embodiments 2-8, wherein X4=I. (11) The anti-TL1A of any one of embodiments 2-10, wherein X5=V. (12) The anti-TL1A of any one of embodiments 2-10, wherein X5=A. (13) The anti-TL1A of any one of embodiments 2-12, wherein X6=M. (14) The anti-TL1A of any one of embodiments 2-12, wherein X6=I. (15) The anti-TL1A of any one of embodiments 2-14, wherein X7=R. (16) The anti-TL1A of any one of embodiments 2-14, wherein X7=T. (17) The anti-TL1A of any one of embodiments 2-16, wherein X8=V. (18) The anti-TL1A of any one of embodiments 2-16, wherein X8=A. (19) The anti-TL1A of any one of embodiments 2-18, wherein X9=M. (20) The anti-TL1A of any one of embodiments 2-4, wherein X9=L. (21) The anti-TL1A of any one of embodiments 1-20, comprising antibody A. (22) The anti-TL1A of any one of embodiments 1-20, comprising antibody B. (23) The anti-TL1A of any one of embodiments 1-20, comprising antibody C. (24) The anti-TL1A of any one of embodiments 1-20, comprising antibody D. (25) The anti-TL1A of any one of embodiments 1-20, comprising antibody E. (26) The anti-TL1A of any one of embodiments 1-20, comprising antibody F. (27) The anti-TL1A of any one of embodiments 1-20, comprising antibody G or I. (28) The anti-TL1A of any one of embodiments 1-20, comprising antibody H. (29) The anti-TL1A of any one of embodiments 1-28, comprising a human IgG1 Fc region comprising: (a) 297A, 297Q, 297G, or 297D, (b) 279F, 279K, or 279L, (c) 228P, (d) 235A, 235E, 235G, 235Q, 235R, or 235S, (e) 237A, 237E, 237K, 237N, or 237R, (f) 234A, 234V, or 234F, (g) 233P, (h) 328A, (i) 327Q or 327T, (j) 329A, 329G, 329Y, or 329R (k) 331S, (1) 236F or 236R, (m) 238A, 238E, 238G, 238H, 238I, 238V, 238 W, or 238Y, (n) 248A, (o) 254D, 254E, 254G, 254H, 254I, 254N, 254P, 254Q, 254T, or 254V, (p) 255N, (q) 256H, 256K, 256R, or 256V, (r) 264S, (s) 265H, 265K, 265S, 265Y, or 265A, (t) 267G, 267H, 267I, or 267K, (u) 268K, (v) 269N or 269Q, (w) 270A, 270G, 270M, or 270N, (x) 271T, (y) 272N, (z) 292E, 292F, 292G, or 292I, (aa) 293S, (bb) 301 W, (cc) 304E, (dd) 311E, 311G, or 311S, (ee) 316F, (ff) 328V, (gg) 330R, (hh) 339E or 339L, (ii) 343I or 343V, (jj) 373A, 373G, or 373S, (kk) 376E, 376 W, or376Y, (11) 380D, (mm) 382D or 382P, (nn) 385P, (oo) 424H, 424M, or 424V, (pp) 434I, (qq) 438G, (rr) 439E, 439H, or 439Q, (ss) 440A, 440D, 440E, 440F, 440M, 440T, or 440V, (tt) E233P, (uu) L235E, (vv) L234A and L235A, (ww) L234A, L235A, and G237A, (xx) L234A, L235A, and P329G, (yy) L234F, L235E, and P331S, (zz) L234A, L235E, and G237A, (aaa), L234A, L235E, G237A, and P331S (bbb) L234A, L235A, G237A, P238 S, H268A, A330S, and P331S (IgG16), (ccc) L234A, L235A, and P329A, (ddd) G236R and L328R, (eee) G237A, (fff) F241A, (ggg) V264A, (hhh) D265A, (iii) D265A and N297A, (jjj) D265A and N297G, (kkk) D270A, (111) A330L, (mmm) P331A or P331S, or (nnn) any combination of (a)-(uu), per Kabat numbering. As used herein, any combination of a group, such as (a) to (uu), includes at least about two or more items from the group, e.g., any combination of a group of (a) to (uu) includes 2, 3, 4, 5, 6, 7, 8, 9, 10, 11, 12, 13, 14, 15, 16, 17, 18, 19, 20, 21, 22, 23, 24, 25, 26, 27, 28, 29, 30, 31, 32, 33, 34, 35, 36, 37, 38, 39, 40, 41, 42, 43, 44, 45, 46, and up to 47 or all of the members of the group. (30) The anti-TL1A of any one of embodiments 1-28, comprising a (i) human IgG4 Fc region or (ii) a human IgG4 Fc region comprising (a) S228P, (b) S228P and L235E, or (c) S228P, F234A, and L235A, per Kabat numbering. (31) The anti-TL1A of any one of embodiments 1-28, comprising a human IgG2 Fc region; IgG2-IgG4 cross-subclass Fc region; IgG2-IgG3 cross-subclass Fc region; IgG2 comprising H268Q, V309L, A330S, P331S (IgG2m4); or IgG2 comprising V234A, G237A, P238S, H268A, V309L, A330S, P331S (IgG26). (32) The anti-TL1A of any one of embodiments 1-31, comprising a heavy chain Fc region comprising any one of SEQ ID NOS: 320-362. (33) The anti-TL1A of any one of embodiments 1-32, comprising a light chain constant region comprising SEQ ID NO: 319. (34) The anti-TL1A of any one of embodiments 1-33, comprising a light chain comprising a light chain framework comprising IGKV3-20*01, or a variant thereof, wherein the variant comprises between about 1 and about 2 substitutions, or between about 1 and about 20 amino acid substitutions, or about 1, 2, 3, 4, 5, 6, 7, 8, 9, 10, 11, 12, 13, 14, 15, 16, 17, 18, 19, or 20 amino acid substitutions in the framework. (35) The anti-TL1A antibody of embodiment 34, wherein X10 is L. (36) The anti-TL1A antibody of embodiment 34, wherein X10 is P. (37) The anti-TL1A antibody of any one of embodiments 34-36, wherein X11 is L. (38) The anti-TL1A antibody of any one of embodiments 34-36, wherein X11 is W.

[0982] In some embodiments, an anti-TL1A antibody comprises a heavy chain framework comprising SEQ ID NO: 302 (X1VQLVQSGAEVKKPGASVKVSCKAS[HCDR 1]WVX2QX3PGQGLEWX4G[HCDR2]RX5TX6TX7DTSTSTX8YX9ELSSLRSEDTAVYYC[HCDR3]WGQGTTVTVSS). In some cases, X1 is Q. In some cases, X1=E. In some cases, X2=R. In some cases, X2=K. In some cases, X3=A. In some cases, X3=R. In some cases, X4=M. In some cases, X4=I. In some cases, X5=V. In some cases, X5=A. In some cases, X6=M. In some cases, X6=I. In some cases, X7=R. In some cases, X7=T. In some cases, X8=V. In some cases, X8=A. In some cases, X9=M. In some cases, X9=L. In some embodiments, X1 is at position 1 of IGHV1-46*02 as determined by Aho or Kabat numbering. In some embodiments, X2 is at position 45 of IGHV1-46*02 as determined by Aho or Kabat numbering. In some embodiments, X3 is at position 47 of IGHV1-46*02 as determined by Aho or Kabat numbering. In some embodiments, X4 is at position 55 of IGHV1-46*02 as determined by Aho or Kabat numbering. In some embodiments, X5 is at position 78 of IGHV1-46*02 as determined by Aho or Kabat numbering. In some embodiments, X6 is at position 80 of IGHV1-46*02 as determined by Aho or Kabat numbering. In some embodiments, X7 is at position 82 of IGHV1-46*02 as determined by Aho or Kabat numbering. In some embodiments, X8 is at position 89 of IGHV1-46*02 as determined by Aho or Kabat numbering. In some embodiments, X9 is at position 91 of IGHV1-46*02 as determined by Aho or Kabat numbering.

[0983] In one aspect, provided herein is another first embodiment of an anti-TL1A antibody comprising a heavy chain framework comprising IGHV1-46*02, or a variant thereof, wherein the variant comprises between about 1 and about 9 amino acid substitutions, or between about 1 and about 20 amino acid substitutions, or about 1, 2, 3, 4, 5, 6, 7, 8, 9, 10, 11, 12, 13, 14, 15, 16, 17, 18, 19, or 20 amino acid substitutions from IGHV1-46*02 framework. Additional embodiments include: (2) The anti-TL1A of embodiment (1), wherein the heavy chain framework comprises SEQ ID NO: 302. (3) The anti-TL1A of embodiment 2, wherein X1=Q. (4) The anti-TL1A of embodiment 2, wherein X1=E. (5) The anti-TL1A of any one of embodiments 2-4, wherein X2=R. (6) The anti-TL1A of any one of embodiments 2-4, wherein X2=K. (7) The anti-TL1A of any one of embodiments 2-6, wherein X3=A. (8) The anti-TL1A of any one of embodiments 2-6, wherein X3=R. (9) The anti-TL1A of any one of embodiments 2-8, wherein X4=M. (10) The anti-TL1A of any one of embodiments 2-8, wherein X4=I. (11) The anti-TL1A of any one of embodiments 2-10, wherein X5=V. (12) The anti-TL1A of any one of embodiments 2-10, wherein X5=A. (13) The anti-TL1A of any one of embodiments 2-12, wherein X6=M. (14) The anti-TL1A of any one of embodiments 2-12, wherein X6=I. (15) The anti-TL1A of any one of embodiments 2-14, wherein X7=R. (16) The anti-TL1A of any one of embodiments 2-14, wherein X7=T. (17) The anti-TL1A of any one of embodiments 2-16, wherein X8=V. (18) The anti-TL1A of any one of embodiments 2-16, wherein X8=A. (19) The anti-TL1A of any one of embodiments 2-18, wherein X9=M. (20) The anti-TL1A of any one of embodiments 2-4, wherein X9=L. (21) The anti-TL1A of any one of embodiments 1-20, comprising antibody A. (22) The anti-TL1A of any one of embodiments 1-20, comprising antibody B. (23) The anti-TL1A of any one of embodiments 1-20, comprising antibody C. (24) The anti-TL1A of any one of embodiments 1-20, comprising antibody D. (25) The anti-TL1A of any one of embodiments 1-20, comprising antibody E. (26) The anti-TL1A of any one of embodiments 1-20, comprising antibody F. (27) The anti-TL1A of any one of embodiments 1-20, comprising antibody G or I. (28) The anti-TL1A of any one of embodiments 1-20, comprising antibody H. (29) The anti-TL1A of any one of embodiments 1-28, comprising a human IgG1 Fc region comprising: (a) 297A, 297Q, 297G, or 297D, (b) 279F, 279K, or 279L, (c) 228P, (d) 235A, 235E, 235G, 235Q, 235R, or 235S, (e) 237A, 237E, 237K, 237N, or 237R, (f) 234A, 234V, or 234F, (g) 233P, (h) 328A, (i) 327Q or 327T, (j) 329A, 329G, 329Y, or 329R (k) 331S, (1) 236F or 236R, (m) 238A, 238E, 238G, 238H, 238I, 238V, 238 W, or 238Y, (n) 248A, (o) 254D, 254E, 254G, 254H, 254I, 254N, 254P, 254Q, 254T, or 254V, (p) 255N, (q) 256H, 256K, 256R, or 256V, (r) 264S, (s) 265H, 265K, 265S, 265Y, or 265A, (t) 267G, 267H, 267I, or 267K, (u) 268K, (v) 269N or 269Q, (w) 270A, 270G, 270M, or 270N, (x) 271T, (y) 272N, (z) 292E, 292F, 292G, or 292I, (aa) 293S, (bb) 301 W, (cc) 304E, (dd) 311E, 311G, or 311S, (ee) 316F, (ff) 328V, (gg) 330R, (hh) 339E or 339L, (ii) 343I or 343V, (jj) 373A, 373G, or 373S, (kk) 376E, 376 W, or 376Y, (11) 380D, (mm) 382D or 382P, (nn) 385P, (oo) 424H, 424M, or 424V, (pp) 434I, (qq) 438G, (rr) 439E, 439H, or 439Q, (ss) 440A, 440D, 440E, 440F, 440M, 440T, or 440V, (tt) E233P, (uu) L235E, (vv) L234A and L235A, (ww) L234A, L235A, and G237A, (xx) L234A, L235A, and P329G, (yy) L234F, L235E, and P331 S, (zz) L234A, L235E, and G237A, (aaa), L234A, L235E, G237A, and P331S (bbb) L234A, L235A, G237A, P238S, H268A, A330S, and P331 S (IgG1σ), (ccc) L234A, L235A, and P329A, (ddd) G236R and L328R, (eee) G237A, (fff) F241A, (ggg) V264A, (hhh) D265A, (iii) D265A and N297A, (jjj) D265A and N297G, (kkk) D270A, (111) A330L, (mmm) P331A or P331S, or (nnn) any combination of (a)-(uu), per Kabat numbering. (30) The anti-TL1A of any one of embodiments 1-28, comprising a (i) human IgG4 Fc region or (ii) a human IgG4 Fc region comprising (a) S228P and L235E, or (b) S228P, F234A, and L235A, per Kabat numbering. (31) The anti-TL1A of any one of embodiments 1-28, comprising a human IgG2 Fc region; IgG2-IgG4 cross-subclass Fc region; IgG2-IgG3 cross-subclass Fc region; IgG2 comprising H268Q, V309L, A330S, P331S (IgG2m4); or IgG2 comprising V234A, G237A, P238S, H268A, V309L, A330S, P331 S (IgG26). (32) The anti-TL1A of any one of embodiments 1-31, comprising a heavy chain Fc region comprising any one of SEQ ID NOS: 320-362. (33) The anti-TL1A of any one of embodiments 1-32, comprising a light chain constant region comprising SEQ ID NO: 319. (34) The anti-TL1A of any one of embodiments 1-33, comprising a light chain comprising a light chain framework comprising IGKV3-20*01, or a variant thereof, wherein the variant comprises between about 1 and about 2 substitutions, or between about 1 and about 20 amino acid substitutions, or about 1, 2, 3, 4, 5, 6, 7, 8, 9, 10, 11, 12, 13, 14, 15, 16, 17, 18, 19, or 20 amino acid substitutions in the framework. (35) The anti-TL1A antibody of embodiment 34, wherein X10 is L. (36) The anti-TL1A antibody of embodiment 34, wherein X10 is P. (37) The anti-TL1A antibody of any one of embodiments 34-36, wherein X11 is L. (38) The anti-TL1A antibody of any one of embodiments 34-36, wherein X11 is W.

[0984] In some embodiments, an anti-TL1A antibody comprises a light chain framework comprising SEQ ID NO: 303 (EIVLTQSPGTLSLSPGERATLSC[LCDR 1]WYQQKPGQAPRX10X11IY[LCDR2]GIPDR FSGSGSGTDFTLTISRLEPEDFAVYYC[LCDR3]FGGGTKLEIK). In some cases, X10 is L. In some cases, X10 is P. In some cases, X11 is L. In some cases, X11 is W. In some embodiments, X10 is at position 54 of IGKV3-20*01 as determined by Aho or Kabat numbering. In some embodiments, X11 is at position 55 of IGKV3-20*01 as determined by Aho or Kabat numbering.

[0985] In some embodiments, an anti-TL1A antibody comprises a heavy chain framework comprising IGHV1-46*02. In some embodiments, an anti-TL1A antibody comprises a heavy chain framework comprising a variant of IGHV1-46*02 comprising between about 1 and about 20 amino acid substitutions from SEQ ID NO: 316. In some embodiments, an anti-TL1A antibody comprises a heavy chain framework comprising a variant of IGHV1-46*02 comprising between about 1 and about 9 amino acid substitutions from SEQ ID NO: 316. In some embodiments, an anti-TL1A antibody comprises a heavy chain framework comprising a variant of IGHV1-46*02 comprising about 1, 2, 3, 4, 5, 6, 7, 8, 9, 10, 11, 12, 13, 14, 15, 16, 17, 18, 19, or 20 amino acid substitutions from SEQ ID NO: 316 in the framework. In some cases, the heavy chain framework substitution comprises Q1E, as determined by Aho or Kabat numbering. In some cases, the heavy chain framework substitution comprises R45K, as determined by Aho or Kabat numbering. In some cases, the heavy chain framework substitution comprises A47R, as determined by Aho or Kabat numbering. In some cases, the heavy chain framework substitution comprises M55I, as determined by Aho or Kabat numbering. In some cases, the heavy chain framework substitution comprises V78A, as determined by Aho or Kabat numbering. In some cases, the heavy chain framework substitution comprises M80I, as determined by Aho or Kabat numbering. In some cases, the heavy chain framework substitution comprises R82T, as determined by Aho or Kabat numbering. In some cases, the heavy chain framework substitution comprises V89A, as determined by Aho or Kabat numbering. In some cases, the heavy chain framework substitution comprises M91L, as determined by Aho or Kabat numbering.

[0986] In some embodiments, an anti-TL1A antibody comprises a light chain framework comprising IGKV3-20*01. In some embodiments, an anti-TL1A antibody comprises a variant of IGKV3-20*01 comprising between about 1 and about 20 amino acid substitutions from SEQ ID NO: 317. In some embodiments, an anti-TL1A antibody comprises a variant of IGKV3-20*01 comprising about 1 amino acid substitution from SEQ ID NO: 317. In some embodiments, an anti-TL1A antibody comprises a light chain framework comprising a variant of IGKV3-20*01 comprising about 2 amino acid substitutions from SEQ ID NO: 317. In some embodiments, an anti-TL1A antibody comprises a light chain framework comprising a variant of IGKV3-20*01 comprising about 1, 2, 3, 4, 5, 6, 7, 8, 9, 10, 11, 12, 13, 14, 15, 16, 17, 18, 19, or 20 amino acid substitutions from SEQ ID NO: 317 in the framework. In some cases, the light chain framework substitution comprises Q1E, as determined by Aho or Kabat numbering. In some cases, the light chain framework substitution comprises R45K, as determined by Aho or Kabat numbering.

[0987] In some embodiments, an anti-TL1A antibody comprises a heavy chain FR1 as set forth by SEQ ID NO: 304. In some embodiments, an anti-TL1A antibody comprises a heavy chain FR2 as set forth by SEQ ID NO: 305. In some embodiments, an anti-TL1A antibody comprises a heavy chain FR2 as set forth by SEQ ID NO: 313. In some embodiments, an anti-TL1A antibody comprises a heavy chain FR2 as set forth by SEQ ID NO: 1317. In some embodiments, an anti-TL1A antibody comprises a heavy chain FR3 as set forth by SEQ ID NO: 306. In some embodiments, an anti-TL1A antibody comprises a heavy chain FR3 as set forth by SEQ ID NO: 307. In some embodiments, an anti-TL1A antibody comprises a heavy chain FR3 as set forth by SEQ ID NO: 314. In some embodiments, an anti-TL1A antibody comprises a heavy chain FR3 as set forth by SEQ ID NO: 315. In some embodiments, an anti-TL1A antibody comprises a heavy chain FR3 as set forth by SEQ ID NO: 1318. In some embodiments, an anti-TL1A antibody comprises a heavy chain FR3 as set forth by SEQ ID NO: 1319. In some embodiments, an anti-TL1A antibody comprises a heavy chain FR3 as set forth by SEQ ID NO: 1320. In some embodiments, an anti-TL1A antibody comprises a heavy chain FR3 as set forth by SEQ ID NO: 1321. In some embodiments, an anti-TL1A antibody comprises a heavy chain FR3 as set forth by SEQ ID NO: 1322. In some embodiments, an anti-TL1A antibody comprises a heavy chain FR3 as set forth by SEQ ID NO: 1323. In some embodiments, an anti-TL1A antibody comprises a heavy chain FR4 as set forth by SEQ ID NO: 308. In some embodiments, an anti-TL1A antibody comprises a light chain FR1 as set forth by SEQ ID NO: 309. In some embodiments, an anti-TL1A antibody comprises a light chain FR2 as set forth by SEQ ID NO: 310. In some embodiments, an anti-TL1A antibody comprises a light chain FR2 as set forth by SEQ ID NO: 1324. In some embodiments, an anti-TL1A antibody comprises a light chain FR3 as set forth by SEQ ID NO: 311. In some embodiments, an anti-TL1A antibody comprises a light chain FR3 as set forth by SEQ ID NO: 1325. In some embodiments, an anti-TL1A antibody comprises a light chain FR4 as set forth by SEQ ID NO: 312.

[0988] In certain embodiments, an anti-TL1A antibody comprises the framework regions set forth in any one of the antibodies in Table 1, wherein the framework regions are defined by the Aho or Kabat, Chothia, or IMGT method. In certain embodiments, an anti-TL1A antibody comprises the framework regions set forth in antibody A217. In certain embodiments, an anti-TL1A antibody comprises the framework regions set forth in antibody A220. In certain embodiments, an anti-TL1A antibody comprises the framework regions set forth in antibody A223. In certain embodiments, an anti-TL1A antibody comprises the framework regions set forth in antibody A219. In certain embodiments, an anti-TL1A antibody comprises the framework regions set forth in antibody A221. In certain embodiments, an anti-TL1A antibody comprises the framework regions set forth in antibody A200. In certain embodiments, an anti-TL1A antibody comprises the framework regions set forth in antibody A213. In certain embodiments, an anti-TL1A antibody comprises the framework regions set forth in antibody A212. In certain embodiments, an anti-TL1A antibody comprises the framework regions set forth in antibody A107. In certain embodiments, an anti-TL1A antibody comprises the framework regions set forth in antibody A205. In certain embodiments, an anti-TL1A antibody comprises the framework regions set forth in antibody A211. In certain embodiments, an anti-TL1A antibody comprises the framework regions set forth in antibody A199. In certain embodiments, an anti-TL1A antibody comprises the framework regions set forth in antibody A15. In certain embodiments, an anti-TL1A antibody comprises the framework regions set forth in antibody A30. In certain embodiments, an anti-TL1A antibody comprises the framework regions set forth in antibody A100. In certain embodiments, an anti-TL1A antibody comprises the framework regions set forth in antibody A181. In certain embodiments, an anti-TL1A antibody comprises the framework regions set forth in antibody A129. In certain embodiments, an anti-TL1A antibody comprises the framework regions set forth in antibody A214. In certain embodiments, an anti-TL1A antibody comprises the framework regions set forth in antibody A216. In certain embodiments, an anti-TL1A antibody comprises the framework regions set forth in antibody A122. In certain embodiments, an anti-TL1A antibody comprises the framework regions set forth in antibody A222. In certain embodiments, an anti-TL1A antibody comprises the framework regions set forth in antibody A188. In certain embodiments, an anti-TL1A antibody comprises the framework regions set forth in antibody A203. In certain embodiments, an anti-TL1A antibody comprises the framework regions set forth in antibody A147. In certain embodiments, an anti-TL1A antibody comprises the framework regions set forth in antibody A127. In certain embodiments, an anti-TL1A antibody comprises the framework regions set forth in antibody A126. In certain embodiments, an anti-TL1A antibody comprises the framework regions set forth in antibody A160. In certain embodiments, an anti-TL1A antibody comprises the framework regions set forth in antibody A157. In certain embodiments, an anti-TL1A antibody comprises the framework regions set forth in antibody A159. In certain embodiments, an anti-TL1A antibody comprises the framework regions set forth in antibody A218. In certain embodiments, an anti-TL1A antibody comprises the framework regions set forth in antibody A158. In certain embodiments, an anti-TL1A antibody comprises the framework regions set forth in antibody A125. In certain embodiments, an anti-TL1A antibody comprises the framework regions set forth in antibody A103. In certain embodiments, an anti-TL1A antibody comprises the framework regions set forth in antibody A64. In certain embodiments, an anti-TL1A antibody comprises the framework regions set forth in antibody A67. In certain embodiments, an anti-TL1A antibody comprises the framework regions set forth in antibody A138. In certain embodiments, an anti-TL1A antibody comprises the framework regions set forth in antibody A68. In certain embodiments, an anti-TL1A antibody comprises the framework regions set forth in antibody A94. In certain embodiments, an anti-TL1A antibody comprises the framework regions set forth in antibody A110. In certain embodiments, an anti-TL1A antibody comprises the framework regions set forth in antibody A197. In certain embodiments, an anti-TL1A antibody comprises the framework regions set forth in antibody A112. In certain embodiments, an anti-TL1A antibody comprises the framework regions set forth in antibody A169. In certain embodiments, an anti-TL1A antibody comprises the framework regions set forth in antibody A173. In certain embodiments, an anti-TL1A antibody comprises the framework regions set forth in antibody A179. In certain embodiments, an anti-TL1A antibody comprises the framework regions set forth in antibody A148. In certain embodiments, an anti-TL1A antibody comprises the framework regions set forth in antibody A115. In certain embodiments, an anti-TL1A antibody comprises the framework regions set forth in antibody A149. In certain embodiments, an anti-TL1A antibody comprises the framework regions set forth in antibody A134. In certain embodiments, an anti-TL1A antibody comprises the framework regions set forth in antibody A113. In certain embodiments, an anti-TL1A antibody comprises the framework regions set forth in antibody A151. In certain embodiments, an anti-TL1A antibody comprises the framework regions set forth in antibody A96. In certain embodiments, an anti-TL1A antibody comprises the framework regions set forth in antibody A132. In certain embodiments, an anti-TL1A antibody comprises the framework regions set forth in antibody A196. In certain embodiments, an anti-TL1A antibody comprises the framework regions set forth in antibody A172. In certain embodiments, an anti-TL1A antibody comprises the framework regions set forth in antibody A75. In certain embodiments, an anti-TL1A antibody comprises the framework regions set forth in antibody A174. In certain embodiments, an anti-TL1A antibody comprises the framework regions set forth in antibody A109. In certain embodiments, an anti-TL1A antibody comprises the framework regions set forth in antibody A198. In certain embodiments, an anti-TL1A antibody comprises the framework regions set forth in antibody A170.

[0989] In certain embodiments, an anti-TL1A antibody comprises the heavy chain framework regions set forth in any one of the antibodies in Table 16, and the light chain framework regions set forth in any one of the antibodies in Table 17, wherein the framework regions are defined by the Aho or Kabat, Chothia, or IMGT method.

### Exemplary Anti-TLIA Variable Regions

[0990] In one aspect, provided herein is an anti-TL1A antibody comprising a heavy chain variable region comprising an amino acid sequence at least about 85%, 90%, 91%, 92%, 93%, 94%, 95%, 96%, 97%, 98%, 99%, or 100% identical to any one of SEQ ID NOS: 101-135; and a light chain variable region at least about 85%, 90%, 91%, 92%, 93%, 94%, 95%, 96%, 97%, 98%, 99%, or 100% identical to any one of SEQ ID NOS: 201-206.

[0991] Further provided herein is a first embodiment of an anti-TL1A antibody comprising a heavy chain variable region and a light chain variable region. Non-limiting additional embodiments include: (Embodiment 2) The anti-TL1A antibody of embodiment 1, wherein the heavy chain variable region comprises SEQ ID NO: 101. (Embodiment 3) The anti-TL1A antibody of embodiment 1, wherein the heavy chain variable region comprises a sequence at least about 90%, 95%, 96%, 97%, 98%, 99%, or 100% identical to SEQ ID NO: 101. (Embodiment 4) The anti-TL1A antibody of embodiment 1, wherein the heavy chain variable region comprises a sequence having about 1, 2, 3, 4, 5, 6, 7, 8, 9 or 10 amino acid substitutions or deletions as compared to SEQ ID NO: 101. (Embodiment 5) The anti-TL1A antibody of embodiment 1, wherein the heavy chain variable region comprises SEQ ID NO: 102. (Embodiment 6) The anti-TL1A antibody of embodiment 1, wherein the heavy chain variable region comprises a sequence at least about 90%, 95%, 96%, 97%, 98%, 99%, or 100% identical to SEQ ID NO: 102. (Embodiment 7) The anti-TL1A antibody of embodiment 1, wherein the heavy chain variable region comprises a sequence having about 1, 2, 3, 4, 5, 6, 7, 8, 9 or 10 amino acid substitutions or deletions as compared to SEQ ID NO: 102. (Embodiment 8) The anti-TL1A antibody of embodiment 1, wherein the heavy chain variable region comprises SEQ ID NO: 103. (Embodiment 9) The anti-TL1A antibody of embodiment 1, wherein the heavy chain variable region comprises a sequence at least about 90%, 95%, 96%, 97%, 98%, 99%, or 100% identical to SEQ ID NO: 103. (Embodiment 10) The anti-TL1A antibody of embodiment 1, wherein the heavy chain variable region comprises a sequence having about 1, 2, 3, 4, 5, 6, 7, 8, 9 or 10 amino acid substitutions or deletions as compared to SEQ ID NO: 103.

[0992] (Embodiment 11) The anti-TL1A antibody of embodiment 1, wherein the heavy chain variable region comprises SEQ ID NO: 104. (Embodiment 12) The anti-TL1A antibody of embodiment 1, wherein the heavy chain variable region comprises a sequence at least about 90%, 95%, 96%, 97%, 98%, 99%, or 100% identical to SEQ ID NO: 104. (Embodiment 13) The anti-TL1A antibody of embodiment 1, wherein the heavy chain variable region comprises a sequence having about 1, 2, 3, 4, 5, 6, 7, 8, 9 or 10 amino acid substitutions or deletions as compared to SEQ ID NO: 104. (Embodiment 14) The anti-TL1A antibody of embodiment 1, wherein the heavy chain variable region comprises SEQ ID NO: 105. (Embodiment 15) The anti-TL1A antibody of embodiment 1, wherein the heavy chain variable region comprises a sequence at least about 90%, 95%, 96%, 97%, 98%, 99%, or 100% identical to SEQ ID NO: 105. (Embodiment 16) The anti-TL1A antibody of embodiment 1, wherein the heavy chain variable region comprises a sequence having about 1, 2, 3, 4, 5, 6, 7, 8, 9 or 10 amino acid substitutions or deletions as compared to SEQ ID NO: 105. (Embodiment 17) The anti-TL1A antibody of embodiment 1, wherein the heavy chain variable region comprises SEQ ID NO: 106. (Embodiment 18) The anti-TL1A antibody of embodiment 1, wherein the heavy chain variable region comprises a sequence at least about 90%, 95%, 96%, 97%, 98%, 99%, or 100% identical to SEQ ID NO: 106. (Embodiment 19) The anti-TL1A antibody of embodiment 1, wherein the heavy chain variable region comprises a sequence having about 1, 2, 3, 4, 5, 6, 7, 8, 9 or 10 amino acid substitutions or deletions as compared to SEQ ID NO: 106. (Embodiment 20) The anti-TL1A antibody of embodiment 1, wherein the heavy chain variable region comprises SEQ ID NO: 107. (Embodiment 21) The anti-TL1A antibody of embodiment 1, wherein the heavy chain variable region comprises a sequence at least about 90%, 95%, 96%, 97%, 98%, 99%, or 100% identical to SEQ ID NO: 107. (Embodiment 22) The anti-TL1A antibody of embodiment 1, wherein the heavy chain variable region comprises a sequence having about 1, 2, 3, 4, 5, 6, 7, 8, 9 or 10 amino acid substitutions or deletions as compared to SEQ ID NO: 107.

[0993] (Embodiment 23) The anti-TL1A antibody of embodiment 1, wherein the heavy chain variable region comprises SEQ ID NO: 108. (Embodiment 24) The anti-TL1A antibody of embodiment 1, wherein the heavy chain variable region comprises a sequence at least about 90%, 95%, 96%, 97%, 98%, 99%, or 100% identical to SEQ ID NO: 108. (Embodiment 25) The anti-TL1A antibody of embodiment 1, wherein the heavy chain variable region comprises a sequence having about 1, 2, 3, 4, 5, 6, 7, 8, 9 or 10 amino acid substitutions or deletions as compared to SEQ ID NO: 108. (Embodiment 26) The anti-TL1A antibody of embodiment 1, wherein the heavy chain variable region comprises SEQ ID NO: 109. (Embodiment 27) The anti-TL1A antibody of embodiment 1, wherein the heavy chain variable region comprises a sequence at least about 90%, 95%, 96%, 97%, 98%, 99%, or 100% identical to SEQ ID NO: 109. (Embodiment 28) The anti-TL1A antibody of embodiment 1, wherein the heavy chain variable region comprises a sequence having about 1, 2, 3, 4, 5, 6, 7, 8, 9 or 10 amino acid substitutions or deletions as compared to SEQ ID NO: 109. (Embodiment 29) The anti-TL1A antibody of embodiment 1, wherein the heavy chain variable region comprises SEQ ID NO: 110. (Embodiment 30) The anti-TL1A antibody of embodiment 1, wherein the heavy chain variable region comprises a sequence at least about 90%, 95%, 96%, 97%, 98%, 99%, or 100% identical to SEQ ID NO: 110. (Embodiment 31) The anti-TL1A antibody of embodiment 1, wherein the heavy chain variable region comprises a sequence having about 1, 2, 3, 4, 5, 6, 7, 8, 9 or 10 amino acid substitutions or deletions as compared to SEQ ID NO: 110. (Embodiment 32) The anti-TL1A antibody of embodiment 1, wherein the heavy chain variable region comprises SEQ ID NO: 111. (Embodiment 33) The anti-TL1A antibody of embodiment 1, wherein the heavy chain variable region comprises a sequence at least about 90%, 95%, 96%, 97%, 98%, 99%, or 100% identical to SEQ ID NO: 111. (Embodiment 34) The anti-TL1A antibody of embodiment 1, wherein the heavy chain variable region comprises a sequence having about 1, 2, 3, 4, 5, 6, 7, 8, 9 or 10 amino acid substitutions or deletions as compared to SEQ ID NO: 111. (Embodiment 35) The anti-TL1A antibody of embodiment 1, wherein the heavy chain variable region comprises SEQ ID NO: 112. (Embodiment 36) The anti-TL1A antibody of embodiment 1, wherein the heavy chain variable region comprises a sequence at least about 90%, 95%, 96%, 97%, 98%, 99%, or 100% identical to SEQ ID NO: 112. (Embodiment 37) The anti-TL1A antibody of embodiment 1, wherein the heavy chain variable region comprises a sequence having about 1, 2, 3, 4, 5, 6, 7, 8, 9 or 10 amino acid substitutions or deletions as compared to SEQ ID NO: 112. (Embodiment 38) The anti-TL1A antibody of embodiment 1, wherein the heavy chain variable region comprises SEQ ID NO: 113. (Embodiment 39) The anti-TL1A antibody of embodiment 1, wherein the heavy chain variable region comprises a sequence at least about 90%, 95%, 96%, 97%, 98%, 99%, or 100% identical to SEQ ID NO: 113. (Embodiment 40) The anti-TL1A antibody of embodiment 1, wherein the heavy chain variable region comprises a sequence having about 1, 2, 3, 4, 5, 6, 7, 8, 9 or 10 amino acid substitutions or deletions as compared to SEQ ID NO: 113.

[0994] (Embodiment 41) The anti-TL1A antibody of embodiment 1, wherein the heavy chain variable region comprises SEQ ID NO: 114. (Embodiment 42) The anti-TL1A antibody of embodiment 1, wherein the heavy chain variable region comprises a sequence at least about 90%, 95%, 96%, 97%, 98%, 99%, or 100% identical to SEQ ID NO: 114. (Embodiment 43) The anti-TL1A antibody of embodiment 1, wherein the heavy chain variable region comprises a sequence having about 1, 2, 3, 4, 5, 6, 7, 8, 9 or 10 amino acid substitutions or deletions as compared to SEQ ID NO: 114. (Embodiment 44) The anti-TL1A antibody of embodiment 1, wherein the heavy chain variable region comprises SEQ ID NO: 115. (Embodiment 45) The anti-TL1A antibody of embodiment 1, wherein the heavy chain variable region comprises a sequence at least about 90%, 95%, 96%, 97%, 98%, 99%, or 100% identical to SEQ ID NO: 115. (Embodiment 46) The anti-TL1A antibody of embodiment 1, wherein the heavy chain variable region comprises a sequence having about 1, 2, 3, 4, 5, 6, 7, 8, 9 or 10 amino acid substitutions or deletions as compared to SEQ ID NO: 115. (Embodiment 47) The anti-TL1A antibody of embodiment 1, wherein the heavy chain variable region comprises SEQ ID NO: 116. (Embodiment 48) The anti-TL1A antibody of embodiment 1, wherein the heavy chain variable region comprises a sequence at least about 90%, 95%, 96%, 97%, 98%, 99%, or 100% identical to SEQ ID NO: 116. (Embodiment 49) The anti-TL1A antibody of embodiment 1, wherein the heavy chain variable region comprises a sequence having about 1, 2, 3, 4, 5, 6, 7, 8, 9 or 10 amino acid substitutions or deletions as compared to SEQ ID NO: 116. (Embodiment 50) The anti-TL1A antibody of embodiment 1, wherein the heavy chain variable region comprises SEQ ID NO: 117. (Embodiment 51) The anti-TL1A antibody of embodiment 1, wherein the heavy chain variable region comprises a sequence at least about 90%, 95%, 96%, 97%, 98%, 99%, or 100% identical to SEQ ID NO: 117. (Embodiment 52) The anti-TL1A antibody of embodiment 1, wherein the heavy chain variable region comprises a sequence having about 1, 2, 3, 4, 5, 6, 7, 8, 9 or 10 amino acid substitutions or deletions as compared to SEQ ID NO: 117.

[0995] (Embodiment 53) The anti-TL1A antibody of embodiment 1, wherein the heavy chain variable region comprises SEQ ID NO: 118. (Embodiment 54) The anti-TL1A antibody of embodiment 1, wherein the heavy chain variable region comprises a sequence at least about 90%, 95%, 96%, 97%, 98%, 99%, or 100% identical to SEQ ID NO: 118. (Embodiment 55) The anti-TL1A antibody of embodiment 1, wherein the heavy chain variable region comprises a sequence having about 1, 2, 3, 4, 5, 6, 7, 8, 9 or 10 amino acid substitutions or deletions as compared to SEQ ID NO: 118. (Embodiment 56) The anti-TL1A antibody of embodiment 1, wherein the heavy chain variable region comprises SEQ ID NO: 119. (Embodiment 57) The anti-TL1A antibody of embodiment 1, wherein the heavy chain variable region comprises a sequence at least about 90%, 95%, 96%, 97%, 98%, 99%, or 100% identical to SEQ ID NO: 119. (Embodiment 58) The anti-TL1A antibody of embodiment 1, wherein the heavy chain variable region comprises a sequence having about 1, 2, 3, 4, 5, 6, 7, 8, 9 or 10 amino acid substitutions or deletions as compared to SEQ ID NO: 119. (Embodiment 59) The anti-TL1A antibody of embodiment 1, wherein the heavy chain variable region comprises SEQ ID NO: 120. (Embodiment 60) The anti-TL1A antibody of embodiment 1, wherein the heavy chain variable region comprises a sequence at least about 90%, 95%, 96%, 97%, 98%, 99%, or 100% identical to SEQ ID NO: 120. (Embodiment 61) The anti-TL1A antibody of embodiment 1, wherein the heavy chain variable region comprises a sequence having about 1, 2, 3, 4, 5, 6, 7, 8, 9 or 10 amino acid substitutions or deletions as compared to SEQ ID NO: 120.

[0996] (Embodiment 62) The anti-TL1A antibody of embodiment 1, wherein the heavy chain variable region comprises SEQ ID NO: 121. (Embodiment 63) The anti-TL1A antibody of embodiment 1, wherein the heavy chain variable region comprises a sequence at least about 90%, 95%, 96%, 97%, 98%, 99%, or 100% identical to SEQ ID NO: 121. (Embodiment 64) The anti-TL1A antibody of embodiment 1, wherein the heavy chain variable region comprises a sequence having about 1, 2, 3, 4, 5, 6, 7, 8, 9 or 10 amino acid substitutions or deletions as compared to SEQ ID NO: 121. (Embodiment 65) The anti-TL1A antibody of embodiment 1, wherein the heavy chain variable region comprises SEQ ID NO: 122. (Embodiment 66) The anti-TL1A antibody of embodiment 1, wherein the heavy chain variable region comprises a sequence at least about 90%, 95%, 96%, 97%, 98%, 99%, or 100% identical to SEQ ID NO: 122. (Embodiment 67) The anti-TL1A antibody of embodiment 1, wherein the heavy chain variable region comprises a sequence having about 1, 2, 3, 4, 5, 6, 7, 8, 9 or 10 amino acid substitutions or deletions as compared to SEQ ID NO: 122. (Embodiment 68) The anti-TL1A antibody of embodiment 1, wherein the heavy chain variable region comprises SEQ ID NO: 123. (Embodiment 69) The anti-TL1A antibody of embodiment 1, wherein the heavy chain variable region comprises a sequence at least about 90%, 95%, 96%, 97%, 98%, 99%, or 100% identical to SEQ ID NO: 123. (Embodiment 70) The anti-TL1A antibody of embodiment 1, wherein the heavy chain variable region comprises a sequence having about 1, 2, 3, 4, 5, 6, 7, 8, 9 or 10 amino acid substitutions or deletions as compared to SEQ ID NO: 123. (Embodiment 71) The anti-TL1A antibody of embodiment 1, wherein the heavy chain variable region comprises SEQ ID NO: 124. (Embodiment 72) The anti-TL1A antibody of embodiment 1, wherein the heavy chain variable region comprises a sequence at least about 90%, 95%, 96%, 97%, 98%, 99%, or 100% identical to SEQ ID NO: 124. (Embodiment 73) The anti-TL1A antibody of embodiment 1, wherein the heavy chain variable region comprises a sequence having about 1, 2, 3, 4, 5, 6, 7, 8, 9 or 10 amino acid substitutions or deletions as compared to SEQ ID NO: 124.

[0997] (Embodiment 74) The anti-TL1A antibody of embodiment 1, wherein the heavy chain variable region comprises SEQ ID NO: 125. (Embodiment 75) The anti-TL1A antibody of embodiment 1, wherein the heavy chain variable region comprises a sequence at least about 90%, 95%, 96%, 97%, 98%, 99%, or 100% identical to SEQ ID NO: 125. (Embodiment 76) The anti-TL1A antibody of embodiment 1, wherein the heavy chain variable region comprises a sequence having about 1, 2, 3, 4, 5, 6, 7, 8, 9 or 10 amino acid substitutions or deletions as compared to SEQ ID NO: 125. (Embodiment 77) The anti-TL1A antibody of embodiment 1, wherein the heavy chain variable region comprises SEQ ID NO: 126. (Embodiment 78) The anti-TL1A antibody of embodiment 1, wherein the heavy chain variable region comprises a sequence at least about 90%, 95%, 96%, 97%, 98%, 99%, or 100% identical to SEQ ID NO: 126. (Embodiment 79) The anti-TL1A antibody of embodiment 1, wherein the heavy chain variable region comprises a sequence having about 1, 2, 3, 4, 5, 6, 7, 8, 9 or 10 amino acid substitutions or deletions as compared to SEQ ID NO: 126. (Embodiment 80) The anti-TL1A antibody of embodiment 1, wherein the heavy chain variable region comprises SEQ ID NO: 127. (Embodiment 81) The anti-TL1A antibody of embodiment 1, wherein the heavy chain variable region comprises a sequence at least about 90%, 95%, 96%, 97%, 98%, 99%, or 100% identical to SEQ ID NO: 127. (Embodiment 82) The anti-TL1A antibody of embodiment 1, wherein the heavy chain variable region comprises a sequence having about 1, 2, 3, 4, 5, 6, 7, 8, 9 or 10 amino acid substitutions or deletions as compared to SEQ ID NO: 127. (Embodiment 83) The anti-TL1A antibody of embodiment 1, wherein the heavy chain variable region comprises SEQ ID NO: 128. (Embodiment 84) The anti-TL1A antibody of embodiment 1, wherein the heavy chain variable region comprises a sequence at least about 90%, 95%, 96%, 97%, 98%, 99%, or 100% identical to SEQ ID NO: 128. (Embodiment 85) The anti-TL1A antibody of embodiment 1, wherein the heavy chain variable region comprises a sequence having about 1, 2, 3, 4, 5, 6, 7, 8, 9 or 10 amino acid substitutions or deletions as compared to SEQ ID NO: 128.

[0998] (Embodiment 86) The anti-TL1A antibody of embodiment 1, wherein the heavy chain variable region comprises SEQ ID NO: 129. (Embodiment 87) The anti-TL1A antibody of embodiment 1, wherein the heavy chain variable region comprises a sequence at least about 90%, 95%, 96%, 97%, 98%, 99%, or 100% identical to SEQ ID NO: 129. (Embodiment 88) The anti-TL1A antibody of embodiment 1, wherein the heavy chain variable region comprises a sequence having about 1, 2, 3, 4, 5, 6, 7, 8, 9 or 10 amino acid substitutions or deletions as compared to SEQ ID NO: 129. (Embodiment 89) The anti-TL1A antibody of embodiment 1, wherein the heavy chain variable region comprises SEQ ID NO: 130. (Embodiment 90) The anti-TL1A antibody of embodiment 1, wherein the heavy chain variable region comprises a sequence at least about 90%, 95%, 96%, 97%, 98%, 99%, or 100% identical to SEQ ID NO: 130. (Embodiment 91) The anti-TL1A antibody of embodiment 1, wherein the heavy chain variable region comprises a sequence having about 1, 2, 3, 4, 5, 6, 7, 8, 9 or 10 amino acid substitutions or deletions as compared to SEQ ID NO: 130. (Embodiment 92) The anti-TL1A antibody of embodiment 1, wherein the heavy chain variable region comprises SEQ ID NO: 131. (Embodiment 93) The anti-TL1A antibody of embodiment 1, wherein the heavy chain variable region comprises a sequence at least about 90%, 95%, 96%, 97%, 98%, 99%, or 100% identical to SEQ ID NO: 131. (Embodiment 94) The anti-TL1A antibody of embodiment 1, wherein the heavy chain variable region comprises a sequence having about 1, 2, 3, 4, 5, 6, 7, 8, 9 or 10 amino acid substitutions or deletions as compared to SEQ ID NO: 131. (Embodiment 95) The anti-TL1A antibody of embodiment 1, wherein the heavy chain variable region comprises SEQ ID NO: 132. (Embodiment 96) The anti-TL1A antibody of embodiment 1, wherein the heavy chain variable region comprises a sequence at least about 90%, 95%, 96%, 97%, 98%, 99%, or 100% identical to SEQ ID NO: 132. (Embodiment 97) The anti-TL1A antibody of embodiment 1, wherein the heavy chain variable region comprises a sequence having about 1, 2, 3, 4, 5, 6, 7, 8, 9 or 10 amino acid substitutions or deletions as compared to SEQ ID NO: 132.

[0999] (Embodiment 98) The anti-TL1A antibody of embodiment 1, wherein the heavy chain variable region comprises SEQ ID NO: 133. (Embodiment 99) The anti-TL1A antibody of embodiment 1, wherein the heavy chain variable region comprises a sequence at least about 90%, 95%, 96%, 97%, 98%, 99%, or 100% identical to SEQ ID NO: 133. (Embodiment 100) The anti-TL1A antibody of embodiment 1, wherein the heavy chain variable region comprises a sequence having about 1, 2, 3, 4, 5, 6, 7, 8, 9 or 10 amino acid substitutions or deletions as compared to SEQ ID NO: 133. (Embodiment 101) The anti-TL1A antibody of embodiment 1, wherein the heavy chain variable region comprises SEQ ID NO: 134. (Embodiment 102) The anti-TL1A antibody of embodiment 1, wherein the heavy chain variable region comprises a sequence at least about 90%, 95%, 96%, 97%, 98%, 99%, or 100% identical to SEQ ID NO: 134. (Embodiment 103) The anti-TL1A antibody of embodiment 1, wherein the heavy chain variable region comprises a sequence having about 1, 2, 3, 4, 5, 6, 7, 8, 9 or 10 amino acid substitutions or deletions as compared to SEQ ID NO: 134. (Embodiment 104) The anti-TL1A antibody of embodiment 1, wherein the heavy chain variable region comprises SEQ ID NO: 135. (Embodiment 105) The anti-TL1A antibody of embodiment 1, wherein the heavy chain variable region comprises a sequence at least about 90%, 95%, 96%, 97%, 98%, 99%, or 100% identical to SEQ ID NO: 135. (Embodiment 106) The anti-TL1A antibody of embodiment 1, wherein the heavy chain variable region comprises a sequence having about 1, 2, 3, 4, 5, 6, 7, 8, 9 or 10 amino acid substitutions or deletions as compared to SEQ ID NO: 135.

[1000] (Embodiment 107) The anti-TL1A antibody of any one of embodiments 1-106, wherein the light chain variable region comprises SEQ ID NO: 201. (Embodiment 108) The anti-TL1A antibody of any one of embodiments 1-106, wherein the light chain variable region comprises a sequence at least about 90%, 95%, 96%, 97%, 98%, 99%, or 100% identical to SEQ ID NO: 201. (Embodiment 109) The anti-TL1A antibody of any one of embodiments 1-106, wherein the light chain variable region comprises a sequence having about 1, 2, 3, 4, 5, 6, 7, 8, 9 or 10 amino acid substitutions or deletions as compared to SEQ ID NO: 201. (Embodiment 110) The anti-TL1A antibody of any one of embodiments 1-106, wherein the light chain variable region comprises SEQ ID NO: 202. (Embodiment 111) The anti-TL1A antibody of any one of embodiments 1-106, wherein the light chain variable region comprises a sequence at least about 90%, 95%, 96%, 97%, 98%, 99%, or 100% identical to SEQ ID NO: 202. (Embodiment 112) The anti-TL1A antibody of any one of embodiments 1-106, wherein the light chain variable region comprises a sequence having about 1, 2, 3, 4, 5, 6, 7, 8, 9 or 10 amino acid substitutions or deletions as compared to SEQ ID NO: 202. (Embodiment 113) The anti-TL1A antibody of any one of embodiments 1-106, wherein the light chain variable region comprises SEQ ID NO: 203. (Embodiment 114) The anti-TL1A antibody of any one of embodiments 1-106, wherein the light chain variable region comprises a sequence at least about 90%, 95%, 96%, 97%, 98%, 99%, or 100% identical to SEQ ID NO: 203. (Embodiment 115) The anti-TL1A antibody of any one of embodiments 1-106, wherein the light chain variable region comprises a sequence having about 1, 2, 3, 4, 5, 6, 7, 8, 9 or 10 amino acid substitutions or deletions as compared to SEQ ID NO: 203. (Embodiment 116) The anti-TL1A antibody of any one of embodiments 1-106, wherein the light chain variable region comprises SEQ ID NO: 204. (Embodiment 117) The anti-TL1A antibody of any one of embodiments 1-106, wherein the light chain variable region comprises a sequence at least about 90%, 95%, 96%, 97%, 98%, 99%, or 100% identical to SEQ ID NO: 204. (Embodiment 118) The anti-TL1A antibody of any one of embodiments 1-106, wherein the light chain variable region comprises a sequence having about 1, 2, 3, 4, 5, 6, 7, 8, 9 or 10 amino acid substitutions or deletions as compared to SEQ ID NO: 204. (Embodiment 119) The anti-TL1A antibody of any one of embodiments 1-106, wherein the light chain variable region comprises SEQ ID NO: 205. (Embodiment 120) The anti-TL1A antibody of any one of embodiments 1-106, wherein the light chain variable region comprises a sequence at least about 90%, 95%, 96%, 97%, 98%, 99%, or 100% identical to SEQ ID NO: 205. (Embodiment 121) The anti-TL1A antibody of any one of embodiments 1-106, wherein the light chain variable region comprises a sequence having about 1, 2, 3, 4, 5, 6, 7, 8, 9 or 10 amino acid substitutions or deletions as compared to SEQ ID NO: 205. (Embodiment 122) The anti-TL1A antibody of any one of embodiments 1-106, wherein the light chain variable region comprises SEQ ID NO: 206. (Embodiment 123) The anti-TL1A antibody of any one of embodiments 1-106, wherein the light chain variable region comprises a sequence at least about 90%, 95%, 96%, 97%, 98%, 99%, or 100% identical to SEQ ID NO: 206. (Embodiment 124) The anti-TL1A antibody of any one of embodiments 1-106, wherein the light chain variable region comprises a sequence having about 1, 2, 3, 4, 5, 6, 7, 8, 9 or 10 amino acid substitutions or deletions as compared to SEQ ID NO: 206.

[1001] (Embodiment 125) The anti-TL1A antibody of embodiment 1, comprising A217. (Embodiment 126) The anti-TL1A antibody of embodiment 1, wherein the heavy chain variable region comprises a sequence at least about 90%, 95%, 96%, 97%, 98%, 99%, or 100% identical to SEQ ID NO: 101, and the light chain variable region comprises a sequence at least about 90%, 95%, 96%, 97%, 98%, 99%, or 100% identical to SEQ ID NO: 201. (Embodiment 127) The anti-TL1A antibody of embodiment 1, comprising A220. (Embodiment 128) The anti-TL1A antibody of embodiment 1, wherein the heavy chain variable region comprises a sequence at least about 90%, 95%, 96%, 97%, 98%, 99%, or 100% identical to SEQ ID NO: 102, and the light chain variable region comprises a sequence at least about 90%, 95%, 96%, 97%, 98%, 99%, or 100% identical to SEQ ID NO: 201. (Embodiment 129) The anti-TL1A antibody of embodiment 1, comprising A223. (Embodiment 130) The anti-TL1A antibody of embodiment 1, wherein the heavy chain variable region comprises a sequence at least about 90%, 95%, 96%, 97%, 98%, 99%, or 100% identical to SEQ ID NO: 103, and the light chain variable region comprises a sequence at least about 90%, 95%, 96%, 97%, 98%, 99%, or 100% identical to SEQ ID NO: 202. (Embodiment 131) The anti-TL1A antibody of embodiment 1, comprising A219. (Embodiment 132) The anti-TL1A antibody of embodiment 1, wherein the heavy chain variable region comprises a sequence at least about 90%, 95%, 96%, 97%, 98%, 99%, or 100% identical to SEQ ID NO: 104, and the light chain variable region comprises a sequence at least about 90%, 95%, 96%, 97%, 98%, 99%, or 100% identical to SEQ ID NO: 201. (Embodiment 133) The anti-TL1A antibody of embodiment 1, comprising A221. (Embodiment 134) The anti-TL1A antibody of embodiment 1, wherein the heavy chain variable region comprises a sequence at least about 90%, 95%, 96%, 97%, 98%, 99%, or 100% identical to SEQ ID NO: 105, and the light chain variable region comprises a sequence at least about 90%, 95%, 96%, 97%, 98%, 99%, or 100% identical to SEQ ID NO: 201.

[1002] (Embodiment 135) The anti-TL1A antibody of embodiment 1, comprising A200. (Embodiment 136) The anti-TL1A antibody of embodiment 1, wherein the heavy chain variable region comprises a sequence at least about 90%, 95%, 96%, 97%, 98%, 99%, or 100% identical to SEQ ID NO: 103, and the light chain variable region comprises a sequence at least about 90%, 95%, 96%, 97%, 98%, 99%, or 100% identical to SEQ ID NO: 201. (Embodiment 137) The anti-TL1A antibody of embodiment 1, comprising A213. (Embodiment 138) The anti-TL1A antibody of embodiment 1, wherein the heavy chain variable region comprises a sequence at least about 90%, 95%, 96%, 97%, 98%, 99%, or 100% identical to SEQ ID NO: 106, and the light chain variable region comprises a sequence at least about 90%, 95%, 96%, 97%, 98%, 99%, or 100% identical to SEQ ID NO: 201. (Embodiment 139) The anti-TL1A antibody of embodiment 1, comprising A212. (Embodiment 140) The anti-TL1A antibody of embodiment 1, wherein the heavy chain variable region comprises a sequence at least about 90%, 95%, 96%, 97%, 98%, 99%, or 100% identical to SEQ ID NO: 107, and the light chain variable region comprises a sequence at least about 90%, 95%, 96%, 97%, 98%, 99%, or 100% identical to SEQ ID NO: 202. (Embodiment 141) The anti-TL1A antibody of embodiment 1, comprising A107. (Embodiment 142) The anti-TL1A antibody of embodiment 1, wherein the heavy chain variable region comprises a sequence at least about 90%, 95%, 96%, 97%, 98%, 99%, or 100% identical to SEQ ID NO: 108, and the light chain variable region comprises a sequence at least about 90%, 95%, 96%, 97%, 98%, 99%, or 100% identical to SEQ ID NO: 202. (Embodiment 143) The anti-TL1A antibody of embodiment 1, comprising A205. (Embodiment 144) The anti-TL1A antibody of embodiment 1, wherein the heavy chain variable region comprises a sequence at least about 90%, 95%, 96%, 97%, 98%, 99%, or 100% identical to SEQ ID NO: 109, and the light chain variable region comprises a sequence at least about 90%, 95%, 96%, 97%, 98%, 99%, or 100% identical to SEQ ID NO: 202.

[1003] (Embodiment 145) The anti-TL1A antibody of embodiment 1, comprising A211. (Embodiment 146) The anti-TL1A antibody of embodiment 1, wherein the heavy chain variable region comprises a sequence at least about 90%, 95%, 96%, 97%, 98%, 99%, or 100% identical to SEQ ID NO: 108, and the light chain variable region comprises a sequence at least about 90%, 95%, 96%, 97%, 98%, 99%, or 100% identical to SEQ ID NO: 201. (Embodiment 147) The anti-TL1A antibody of embodiment 1, comprising A199. (Embodiment 148) The anti-TL1A antibody of embodiment 1, wherein the heavy chain variable region comprises a sequence at least about 90%, 95%, 96%, 97%, 98%, 99%, or 100% identical to SEQ ID NO: 109, and the light chain variable region comprises a sequence at least about 90%, 95%, 96%, 97%, 98%, 99%, or 100% identical to SEQ ID NO: 201. (Embodiment 149) The anti-TL1A antibody of embodiment 1, comprising A15. (Embodiment 150) The anti-TL1A antibody of embodiment 1, wherein the heavy chain variable region comprises a sequence at least about 90%, 95%, 96%, 97%, 98%, 99%, or 100% identical to SEQ ID NO: 108, and the light chain variable region comprises a sequence at least about 90%, 95%, 96%, 97%, 98%, 99%, or 100% identical to SEQ ID NO: 203. (Embodiment 151) The anti-TL1A antibody of embodiment 1, comprising A30. (Embodiment 152) The anti-TL1A antibody of embodiment 1, wherein the heavy chain variable region comprises a sequence at least about 90%, 95%, 96%, 97%, 98%, 99%, or 100% identical to SEQ ID NO: 108, and the light chain variable region comprises a sequence at least about 90%, 95%, 96%, 97%, 98%, 99%, or 100% identical to SEQ ID NO: 204. (Embodiment 153) The anti-TL1A antibody of embodiment 1, comprising A100. (Embodiment 154) The anti-TL1A antibody of embodiment 1, wherein the heavy chain variable region comprises a sequence at least about 90%, 95%, 96%, 97%, 98%, 99%, or 100% identical to SEQ ID NO: 107, and the light chain variable region comprises a sequence at least about 90%, 95%, 96%, 97%, 98%, 99%, or 100% identical to SEQ ID NO: 204.

[1004] (Embodiment 155) The anti-TL1A antibody of embodiment 1, comprising A181. (Embodiment 156) The anti-TL1A antibody of embodiment 1, wherein the heavy chain variable region comprises a sequence at least about 90%, 95%, 96%, 97%, 98%, 99%, or 100% identical to SEQ ID NO: 107, and the light chain variable region comprises a sequence at least about 90%, 95%, 96%, 97%, 98%, 99%, or 100% identical to SEQ ID NO: 202. (Embodiment 157) The anti-TL1A antibody of embodiment 1, comprising A129. (Embodiment 158) The anti-TL1A antibody of embodiment 1, wherein the heavy chain variable region comprises a sequence at least about 90%, 95%, 96%, 97%, 98%, 99%, or 100% identical to SEQ ID NO: 110, and the light chain variable region comprises a sequence at least about 90%, 95%, 96%, 97%, 98%, 99%, or 100% identical to SEQ ID NO: 204. (Embodiment 159) The anti-TL1A antibody of embodiment 1, comprising A214. (Embodiment 160) The anti-TL1A antibody of embodiment 1, wherein the heavy chain variable region comprises a sequence at least about 90%, 95%, 96%, 97%, 98%, 99%, or 100% identical to SEQ ID NO: 111, and the light chain variable region comprises a sequence at least about 90%, 95%, 96%, 97%, 98%, 99%, or 100% identical to SEQ ID NO: 201. (Embodiment 161) The anti-TL1A antibody of embodiment 1, comprising A216. (Embodiment 162) The anti-TL1A antibody of embodiment 1, wherein the heavy chain variable region comprises a sequence at least about 90%, 95%, 96%, 97%, 98%, 99%, or 100% identical to SEQ ID NO: 112, and the light chain variable region comprises a sequence at least about 90%, 95%, 96%, 97%, 98%, 99%, or 100% identical to SEQ ID NO: 201. (Embodiment 163) The anti-TL1A antibody of embodiment 1, comprising A122. (Embodiment 164) The anti-TL1A antibody of embodiment 1, wherein the heavy chain variable region comprises a sequence at least about 90%, 95%, 96%, 97%, 98%, 99%, or 100% identical to SEQ ID NO: 113, and the light chain variable region comprises a sequence at least about 90%, 95%, 96%, 97%, 98%, 99%, or 100% identical to SEQ ID NO: 204.

[1005] (Embodiment 165) The anti-TL1A antibody of embodiment 1, comprising A222. (Embodiment 166) The anti-TL1A antibody of embodiment 1, wherein the heavy chain variable region comprises a sequence at least about 90%, 95%, 96%, 97%, 98%, 99%, or 100% identical to SEQ ID NO: 114, and the light chain variable region comprises a sequence at least about 90%, 95%, 96%, 97%, 98%, 99%, or 100% identical to SEQ ID NO: 201. (Embodiment 167) The anti-TL1A antibody of embodiment 1, comprising A188. (Embodiment 168) The anti-TL1A antibody of embodiment 1, wherein the heavy chain variable region comprises a sequence at least about 90%, 95%, 96%, 97%, 98%, 99%, or 100% identical to SEQ ID NO: 115, and the light chain variable region comprises a sequence at least about 90%, 95%, 96%, 97%, 98%, 99%, or 100% identical to SEQ ID NO: 202. (Embodiment 169) The anti-TL1A antibody of embodiment 1, comprising A203. (Embodiment 170) The anti-TL1A antibody of embodiment 1, wherein the heavy chain variable region comprises a sequence at least about 90%, 95%, 96%, 97%, 98%, 99%, or 100% identical to SEQ ID NO: 116, and the light chain variable region comprises a sequence at least about 90%, 95%, 96%, 97%, 98%, 99%, or 100% identical to SEQ ID NO: 201. (Embodiment 171) The anti-TL1A antibody of embodiment 1, comprising A147. (Embodiment 172) The anti-TL1A antibody of embodiment 1, wherein the heavy chain variable region comprises a sequence at least about 90%, 95%, 96%, 97%, 98%, 99%, or 100% identical to SEQ ID NO: 117, and the light chain variable region comprises a sequence at least about 90%, 95%, 96%, 97%, 98%, 99%, or 100% identical to SEQ ID NO: 201. (Embodiment 173) The anti-TL1A antibody of embodiment 1, comprising A127. (Embodiment 174) The anti-TL1A antibody of embodiment 1, wherein the heavy chain variable region comprises a sequence at least about 90%, 95%, 96%, 97%, 98%, 99%, or 100% identical to SEQ ID NO: 118, and the light chain variable region comprises a sequence at least about 90%, 95%, 96%, 97%, 98%, 99%, or 100% identical to SEQ ID NO: 204.

[1006] (Embodiment 175) The anti-TL1A antibody of embodiment 1, comprising A126. (Embodiment 176) The anti-TL1A antibody of embodiment 1, wherein the heavy chain variable region comprises a sequence at least about 90%, 95%, 96%, 97%, 98%, 99%, or 100% identical to SEQ ID NO: 114, and the light chain variable region comprises a sequence at least about 90%, 95%, 96%, 97%, 98%, 99%, or 100% identical to SEQ ID NO: 204. (Embodiment 177) The anti-TL1A antibody of embodiment 1, comprising A160. (Embodiment 178) The anti-TL1A antibody of embodiment 1, wherein the heavy chain variable region comprises a sequence at least about 90%, 95%, 96%, 97%, 98%, 99%, or 100% identical to SEQ ID NO: 102, and the light chain variable region comprises a sequence at least about 90%, 95%, 96%, 97%, 98%, 99%, or 100% identical to SEQ ID NO: 204. (Embodiment 179) The anti-TL1A antibody of embodiment 1, comprising A157. (Embodiment 180) The anti-TL1A antibody of embodiment 1, wherein the heavy chain variable region comprises a sequence at least about 90%, 95%, 96%, 97%, 98%, 99%, or 100% identical to SEQ ID NO: 104, and the light chain variable region comprises a sequence at least about 90%, 95%, 96%, 97%, 98%, 99%, or 100% identical to SEQ ID NO: 204. (Embodiment 181) The anti-TL1A antibody of embodiment 1, comprising A159. (Embodiment 182) The anti-TL1A antibody of embodiment 1, wherein the heavy chain variable region comprises a sequence at least about 90%, 95%, 96%, 97%, 98%, 99%, or 100% identical to SEQ ID NO: 119, and the light chain variable region comprises a sequence at least about 90%, 95%, 96%, 97%, 98%, 99%, or 100% identical to SEQ ID NO: 204. (Embodiment 183) The anti-TL1A antibody of embodiment 1, comprising A218. (Embodiment 184) The anti-TL1A antibody of embodiment 1, wherein the heavy chain variable region comprises a sequence at least about 90%, 95%, 96%, 97%, 98%, 99%, or 100% identical to SEQ ID NO: 119, and the light chain variable region comprises a sequence at least about 90%, 95%, 96%, 97%, 98%, 99%, or 100% identical to SEQ ID NO: 201.

[1007] (Embodiment 185) The anti-TL1A antibody of embodiment 1, comprising A158. (Embodiment 186) The anti-TL1A antibody of embodiment 1, wherein the heavy chain variable region comprises a sequence at least about 90%, 95%, 96%, 97%, 98%, 99%, or 100% identical to SEQ ID NO: 101, and the light chain variable region comprises a sequence at least about 90%, 95%, 96%, 97%, 98%, 99%, or 100% identical to SEQ ID NO: 204. (Embodiment 187) The anti-TL1A antibody of embodiment 1, comprising A125. (Embodiment 188) The anti-TL1A antibody of embodiment 1, wherein the heavy chain variable region comprises a sequence at least about 90%, 95%, 96%, 97%, 98%, 99%, or 100% identical to SEQ ID NO: 105, and the light chain variable region comprises a sequence at least about 90%, 95%, 96%, 97%, 98%, 99%, or 100% identical to SEQ ID NO: 204. (Embodiment 189) The anti-TL1A antibody of embodiment 1, comprising A103. (Embodiment 190) The anti-TL1A antibody of embodiment 1, wherein the heavy chain variable region comprises a sequence at least about 90%, 95%, 96%, 97%, 98%, 99%, or 100% identical to SEQ ID NO: 120, and the light chain variable region comprises a sequence at least about 90%, 95%, 96%, 97%, 98%, 99%, or 100% identical to SEQ ID NO: 204. (Embodiment 191) The anti-TL1A antibody of embodiment 1, comprising A64. (Embodiment 192) The anti-TL1A antibody of embodiment 1, wherein the heavy chain variable region comprises a sequence at least about 90%, 95%, 96%, 97%, 98%, 99%, or 100% identical to SEQ ID NO: 121, and the light chain variable region comprises a sequence at least about 90%, 95%, 96%, 97%, 98%, 99%, or 100% identical to SEQ ID NO: 202. (Embodiment 193) The anti-TL1A antibody of embodiment 1, comprising A67. (Embodiment 194) The anti-TL1A antibody of embodiment 1, wherein the heavy chain variable region comprises a sequence at least about 90%, 95%, 96%, 97%, 98%, 99%, or 100% identical to SEQ ID NO: 122, and the light chain variable region comprises a sequence at least about 90%, 95%, 96%, 97%, 98%, 99%, or 100% identical to SEQ ID NO: 202.

[1008] (Embodiment 195) The anti-TL1A antibody of embodiment 1, comprising A138. (Embodiment 196) The anti-TL1A antibody of embodiment 1, wherein the heavy chain variable region comprises a sequence at least about 90%, 95%, 96%, 97%, 98%, 99%, or 100% identical to SEQ ID NO: 122, and the light chain variable region comprises a sequence at least about 90%, 95%, 96%, 97%, 98%, 99%, or 100% identical to SEQ ID NO: 204. (Embodiment 197) The anti-TL1A antibody of embodiment 1, comprising A68. (Embodiment 198) The anti-TL1A antibody of embodiment 1, wherein the heavy chain variable region comprises a sequence at least about 90%, 95%, 96%, 97%, 98%, 99%, or 100% identical to SEQ ID NO: 123, and the light chain variable region comprises a sequence at least about 90%, 95%, 96%, 97%, 98%, 99%, or 100% identical to SEQ ID NO: 202. (Embodiment 199) The anti-TL1A antibody of embodiment 1, comprising A94. (Embodiment 200) The anti-TL1A antibody of embodiment 1, wherein the heavy chain variable region comprises a sequence at least about 90%, 95%, 96%, 97%, 98%, 99%, or 100% identical to SEQ ID NO: 124, and the light chain variable region comprises a sequence at least about 90%, 95%, 96%, 97%, 98%, 99%, or 100% identical to SEQ ID NO: 202. (Embodiment 201) The anti-TL1A antibody of embodiment 1, comprising A110. (Embodiment 202) The anti-TL1A antibody of embodiment 1, wherein the heavy chain variable region comprises a sequence at least about 90%, 95%, 96%, 97%, 98%, 99%, or 100% identical to SEQ ID NO: 125, and the light chain variable region comprises a sequence at least about 90%, 95%, 96%, 97%, 98%, 99%, or 100% identical to SEQ ID NO: 205. (Embodiment 203) The anti-TL1A antibody of embodiment 1, comprising A197. (Embodiment 204) The anti-TL1A antibody of embodiment 1, wherein the heavy chain variable region comprises a sequence at least about 90%, 95%, 96%, 97%, 98%, 99%, or 100% identical to SEQ ID NO: 116, and the light chain variable region comprises a sequence at least about 90%, 95%, 96%, 97%, 98%, 99%, or 100% identical to SEQ ID NO: 205.

[1009] (Embodiment 205) The anti-TL1A antibody of embodiment 1, comprising A112. (Embodiment 206) The anti-TL1A antibody of embodiment 1, wherein the heavy chain variable region comprises a sequence at least about 90%, 95%, 96%, 97%, 98%, 99%, or 100% identical to SEQ ID NO: 117, and the light chain variable region comprises a sequence at least about 90%, 95%, 96%, 97%, 98%, 99%, or 100% identical to SEQ ID NO: 205. (Embodiment 207) The anti-TL1A antibody of embodiment 1, comprising A169. (Embodiment 208) The anti-TL1A antibody of embodiment 1, wherein the heavy chain variable region comprises a sequence at least about 90%, 95%, 96%, 97%, 98%, 99%, or 100% identical to SEQ ID NO: 126, and the light chain variable region comprises a sequence at least about 90%, 95%, 96%, 97%, 98%, 99%, or 100% identical to SEQ ID NO: 205. (Embodiment 209) The anti-TL1A antibody of embodiment 1, comprising A173. (Embodiment 210) The anti-TL1A antibody of embodiment 1, wherein the heavy chain variable region comprises a sequence at least about 90%, 95%, 96%, 97%, 98%, 99%, or 100% identical to SEQ ID NO: 127, and the light chain variable region comprises a sequence at least about 90%, 95%, 96%, 97%, 98%, 99%, or 100% identical to SEQ ID NO: 205. (Embodiment 211) The anti-TL1A antibody of embodiment 1, comprising A179. (Embodiment 212) The anti-TL1A antibody of embodiment 1, wherein the heavy chain variable region comprises a sequence at least about 90%, 95%, 96%, 97%, 98%, 99%, or 100% identical to SEQ ID NO: 127, and the light chain variable region comprises a sequence at least about 90%, 95%, 96%, 97%, 98%, 99%, or 100% identical to SEQ ID NO: 201. (Embodiment 213) The anti-TL1A antibody of embodiment 1, comprising A148. (Embodiment 214) The anti-TL1A antibody of embodiment 1, wherein the heavy chain variable region comprises a sequence at least about 90%, 95%, 96%, 97%, 98%, 99%, or 100% identical to SEQ ID NO: 121, and the light chain variable region comprises a sequence at least about 90%, 95%, 96%, 97%, 98%, 99%, or 100% identical to SEQ ID NO: 201.

[1010] (Embodiment 215) The anti-TL1A antibody of embodiment 1, comprising A115. (Embodiment 216) The anti-TL1A antibody of embodiment 1, wherein the heavy chain variable region comprises a sequence at least about 90%, 95%, 96%, 97%, 98%, 99%, or 100% identical to SEQ ID NO: 122, and the light chain variable region comprises a sequence at least about 90%, 95%, 96%, 97%, 98%, 99%, or 100% identical to SEQ ID NO: 205. (Embodiment 217) The anti-TL1A antibody of embodiment 1, comprising A149. (Embodiment 218) The anti-TL1A antibody of embodiment 1, wherein the heavy chain variable region comprises a sequence at least about 90%, 95%, 96%, 97%, 98%, 99%, or 100% identical to SEQ ID NO: 122, and the light chain variable region comprises a sequence at least about 90%, 95%, 96%, 97%, 98%, 99%, or 100% identical to SEQ ID NO: 201. (Embodiment 219) The anti-TL1A antibody of embodiment 1, comprising A134. (Embodiment 220) The anti-TL1A antibody of embodiment 1, wherein the heavy chain variable region comprises a sequence at least about 90%, 95%, 96%, 97%, 98%, 99%, or 100% identical to SEQ ID NO: 122, and the light chain variable region comprises a sequence at least about 90%, 95%, 96%, 97%, 98%, 99%, or 100% identical to SEQ ID NO: 206. (Embodiment 221) The anti-TL1A antibody of embodiment 1, comprising A113. (Embodiment 222) The anti-TL1A antibody of embodiment 1, wherein the heavy chain variable region comprises a sequence at least about 90%, 95%, 96%, 97%, 98%, 99%, or 100% identical to SEQ ID NO: 124, and the light chain variable region comprises a sequence at least about 90%, 95%, 96%, 97%, 98%, 99%, or 100% identical to SEQ ID NO: 205. (Embodiment 223) The anti-TL1A antibody of embodiment 1, comprising A151. (Embodiment 224) The anti-TL1A antibody of embodiment 1, wherein the heavy chain variable region comprises a sequence at least about 90%, 95%, 96%, 97%, 98%, 99%, or 100% identical to SEQ ID NO: 124, and the light chain variable region comprises a sequence at least about 90%, 95%, 96%, 97%, 98%, 99%, or 100% identical to SEQ ID NO: 201.

[1011] (Embodiment 225) The anti-TL1A antibody of embodiment 1, comprising A96. (Embodiment 226) The anti-TL1A antibody of embodiment 1, wherein the heavy chain variable region comprises a sequence at least about 90%, 95%, 96%, 97%, 98%, 99%, or 100% identical to SEQ ID NO: 128, and the light chain variable region comprises a sequence at least about 90%, 95%, 96%, 97%, 98%, 99%, or 100% identical to SEQ ID NO: 205. (Embodiment 227) The anti-TL1A antibody of embodiment 1, comprising A132. (Embodiment 228) The anti-TL1A antibody of embodiment 1, wherein the heavy chain variable region comprises a sequence at least about 90%, 95%, 96%, 97%, 98%, 99%, or 100% identical to SEQ ID NO: 128, and the light chain variable region comprises a sequence at least about 90%, 95%, 96%, 97%, 98%, 99%, or 100% identical to SEQ ID NO: 206. (Embodiment 229) The anti-TL1A antibody of embodiment 1, comprising A196. (Embodiment 230) The anti-TL1A antibody of embodiment 1, wherein the heavy chain variable region comprises a sequence at least about 90%, 95%, 96%, 97%, 98%, 99%, or 100% identical to SEQ ID NO: 129, and the light chain variable region comprises a sequence at least about 90%, 95%, 96%, 97%, 98%, 99%, or 100% identical to SEQ ID NO: 205. (Embodiment 231) The anti-TL1A antibody of embodiment 1, comprising A172. (Embodiment 232) The anti-TL1A antibody of embodiment 1, wherein the heavy chain variable region comprises a sequence at least about 90%, 95%, 96%, 97%, 98%, 99%, or 100% identical to SEQ ID NO: 130, and the light chain variable region comprises a sequence at least about 90%, 95%, 96%, 97%, 98%, 99%, or 100% identical to SEQ ID NO: 205. (Embodiment 233) The anti-TL1A antibody of embodiment 1, comprising A75. (Embodiment 234) The anti-TL1A antibody of embodiment 1, wherein the heavy chain variable region comprises a sequence at least about 90%, 95%, 96%, 97%, 98%, 99%, or 100% identical to SEQ ID NO: 131, and the light chain variable region comprises a sequence at least about 90%, 95%, 96%, 97%, 98%, 99%, or 100% identical to SEQ ID NO: 205.

[1012] (Embodiment 235) The anti-TL1A antibody of embodiment 1, comprising A174. (Embodiment 236) The anti-TL1A antibody of embodiment 1, wherein the heavy chain variable region comprises a sequence at least about 90%, 95%, 96%, 97%, 98%, 99%, or 100% identical to SEQ ID NO: 132, and the light chain variable region comprises a sequence at least about 90%, 95%, 96%, 97%, 98%, 99%, or 100% identical to SEQ ID NO: 205. (Embodiment 237) The anti-TL1A antibody of embodiment 1, comprising A109. (Embodiment 238) The anti-TL1A antibody of embodiment 1, wherein the heavy chain variable region comprises a sequence at least about 90%, 95%, 96%, 97%, 98%, 99%, or 100% identical to SEQ ID NO: 133, and the light chain variable region comprises a sequence at least about 90%, 95%, 96%, 97%, 98%, 99%, or 100% identical to SEQ ID NO: 205. (Embodiment 239) The anti-TL1A antibody of embodiment 1, comprising A198. (Embodiment 240) The anti-TL1A antibody of embodiment 1, wherein the heavy chain variable region comprises a sequence at least about 90%, 95%, 96%, 97%, 98%, 99%, or 100% identical to SEQ ID NO: 134, and the light chain variable region comprises a sequence at least about 90%, 95%, 96%, 97%, 98%, 99%, or 100% identical to SEQ ID NO: 205. (Embodiment 241) The anti-TL1A antibody of embodiment 1, comprising A170. (Embodiment 242) The anti-TL1A antibody of embodiment 1, wherein the heavy chain variable region comprises a sequence at least about 90%, 95%, 96%, 97%, 98%, 99%, or 100% identical to SEQ ID NO: 135, and the light chain variable region comprises a sequence at least about 90%, 95%, 96%, 97%, 98%, 99%, or 100% identical to SEQ ID NO: 205. (Embodiment 243) The anti-TL1A antibody of embodiment 1, comprising A500. (Embodiment 244) The anti-TL1A antibody of embodiment 1, comprising A501.

[1013] (Embodiment 245) The anti-TL1A of any one of embodiments 1-244, comprising a human IgG1 Fc region comprising: (a) 297A, 297Q, 297G, or 297D, (b) 279F, 279K, or 279L, (c) 228P, (d) 235A, 235E, 235G, 235Q, 235R, or 235S, (e) 237A, 237E, 237K, 237N, or 237R, (f) 234A, 234V, or 234F, (g) 233P, (h) 328A, (i) 327Q or 327T, (j) 329A, 329G, 329Y, or 329R (k) 331S, (1) 236F or 236R, (m) 238A, 238E, 238G, 238H, 238I, 238V, 238 W, or 238Y, (n) 248A, (o) 254D, 254E, 254G, 254H, 254I, 254N, 254P, 254Q, 254T, or 254V, (p) 255N, (q) 256H, 256K, 256R, or 256V, (r) 264S, (s) 265H, 265K, 265S, 265Y, or 265A, (t) 267G, 267H, 267I, or 267K, (u) 268K, (v) 269N or 269Q, (w) 270A, 270G, 270M, or 270N, (x) 271T, (y) 272N, (z) 292E, 292F, 292G, or 292I, (aa) 293S, (bb) 301 W, (cc) 304E, (dd) 311E, 311G, or 311S, (ee) 316F, (ff) 328V, (gg) 330R, (hh) 339E or 339L, (ii) 343I or 343V, (j j) 373A, 373G, or 373S, (kk) 376E, 376 W, or 376Y, (11) 380D, (m m) 382D or 382P, (nn) 385P, (oo) 424H, 424M, or 424V, (pp) 434I, (qq) 438G, (rr) 439E, 439H, or 439Q, (ss) 440A, 440D, 440E, 440F, 440M, 440T, or 440V, (tt) E233P, (uu) L235E, (vv) L234A and L235A, (ww) L234A, L235A, and G237A, (xx) L234A, L235A, and P329G, (yy) L234F, L235E, and P331S, (zz) L234A, L235E, and G237A, (aaa), L234A, L235E, G237A, and P331S (bbb) L234A, L235A, G237A, P238S, H268A, A330S, and P331S (IgG16), (ccc) L234A, L235A, and P329A, (ddd) G236R and L328R, (eee) G237A, (fff) F241A, (ggg) V264A, (hhh) D265A, (iii) D265A and N297A, (jjj) D265A and N297G, (kkk) D270A, (111) A330L, (mmm) P331A or P331S, or (nnn) any combination of (a)-(uu), per Kabat numbering. (Embodiment 246) The anti-TL1A of any one of embodiments 1-244, comprising a (i) human IgG4 Fc region or (ii) a human IgG4 Fc region comprising (a) S228P and L235E, or (b) S228P, F234A, and L235A, per Kabat numbering. (Embodiment 247) The anti-TL1A of any one of embodiments 1-244, comprising a human IgG2 Fc region; IgG2-IgG4 cross-subclass Fc region; IgG2-IgG3 cross-subclass Fc region; IgG2 comprising H268Q, V309L, A330S, P331S (IgG2m4); or IgG2 comprising V234A, G237A, P238S, H268A, V309L, A330 S, P331S (IgG26). (Embodiment 248) The anti-TL1A of any one of embodiments 1-247, comprising a heavy chain Fc region comprising any one of SEQ ID NOS: 320-362. (Embodiment 249) The anti-TL1A of any one of embodiments 1-248, comprising a light chain constant region comprising SEQ ID NO: 319.

[1014] (Embodiment 250) The anti-TL1A of any one of embodiments 1-249, comprising at least about 80% monomeric fraction as determined by the size exclusion chromatography method described herein. (Embodiment 251) The anti-TL1A of any one of embodiments 1-250, comprising at least about 81%, at least about 82%, at least about 83%, or at least about 84% monomeric fraction as determined by the size exclusion chromatography method described herein. (Embodiment 252) The anti-TL1A of any one of embodiments 1-251, comprising at least about 85% monomeric fraction as determined by the size exclusion chromatography method described herein. (Embodiment 253) The anti-TL1A of any one of embodiments 1-252, comprising at least about 86%, at least about 87%, at least about 88%, or at least about 89% monomeric fraction as determined by the size exclusion chromatography method described herein. (Embodiment 254) The anti-TL1A of any one of embodiments 1-253, comprising at least about 90% monomeric fraction as determined by the size exclusion chromatography method described herein. (Embodiment 255) The anti-TL1A of any one of embodiments 1-254, comprising at least about 91%, at least about 92%, at least about 93%, or at least about 94% monomeric fraction as determined by the size exclusion chromatography method described herein. (Embodiment 256) The anti-TL1A of any one of embodiments 1-255, comprising at least about 95% monomeric fraction as determined by the size exclusion chromatography method described herein. (Embodiment 257) The anti-TL1A of any one of embodiments 1-256, comprising at least about 96%, at least about 97%, at least about 98%, or at least about 99% monomeric fraction as determined by the size exclusion chromatography method described herein.

[1015] (Embodiment 258) The anti-TL1A of any one of embodiments 1-257, comprising at least about 2 μg/mL expression as determined by the method disclosed herein. (Embodiment 259) The anti-TL1A of any one of embodiments 1-258, comprising between about 2 μg/mL and about 60 μg/mL expression as determined by the method disclosed herein. (Embodiment 260) The anti-TL1A of any one of embodiments 1-259, comprising between about 5 μg/mL and about 60 μg/mL expression as determined by the method disclosed herein. (Embodiment 261) The anti-TL1A of any one of embodiments 1-260, comprising between about 10 μg/mL and about 60 μg/mL expression as determined by the method disclosed herein. (Embodiment 262) The anti-TL1A of any one of embodiments 1-261, comprising at least about 5 μg/mL expression as determined by the method disclosed herein. (Embodiment 263) The anti-TL1A of any one of embodiments 1-262, comprising at least about 10 μg/mL expression as determined by the method disclosed herein. (Embodiment 264) The anti-TL1A of any one of embodiments 1-263, comprising at least about 15 μg/mL expression as determined by the method disclosed herein. (Embodiment 265) The anti-TL1A of any one of embodiments 1-264, comprising at least about 20 μg/mL expression as determined by the method disclosed herein.

[1016] In one aspect, provided herein is an anti-TL1A antibody comprising a heavy chain variable region comprising an amino acid sequence at least about 85%, 90%, 91%, 92%, 93%, 94%, 95%, 96%, 97%, 98%, 99%, or 100% identical to any one of SEQ ID NOS: 1200-1263; and a light chain variable region at least about 85%, 90%, 91%, 92%, 93%, 94%, 95%, 96%, 97%, 98%, 99%, or 100% identical to any one of SEQ ID NOS: 1264-1300, 1304-1316.

[1017] In one aspect, provided is an anti-TL1A antibody comprising a heavy chain variable region comprising an amino acid sequence at least about 85%, 90%, 91%, 92%, 93%, 94%, 95%, 96%, 97%, 98%, 99%, or 100% identical to SEQ ID NO: 136; and a light chain variable region at least about 85%, 90%, 91%, 92%, 93%, 94%, 95%, 96%, 97%, 98%, 99%, or 100% identical to SEQ ID NO: 202 (clone 34). In one aspect, provided is an anti-TL1A antibody comprising a heavy chain variable region comprising an amino acid sequence at least about 85%, 90%, 91%, 92%, 93%, 94%, 95%, 96%, 97%, 98%, 99%, or 100% identical to SEQ ID NO: 1200; and a light chain variable region at least about 85%, 90%, 91%, 92%, 93%, 94%, 95%, 96%, 97%, 98%, 99%, or 100% identical to SEQ ID NO: 12646 (5C3D11). In one aspect, provided is an anti-TL1A antibody comprising a heavy chain variable region comprising an amino acid sequence at least about 85%, 90%, 91%, 92%, 93%, 94%, 95%, 96%, 97%, 98%, 99%, or 100% identical to SEQ ID NO: 1201; and a light chain variable region at least about 85%, 90%, 91%, 92%, 93%, 94%, 95%, 96%, 97%, 98%, 99%, or 100% identical to SEQ ID NO: 1265 (9E12E5). In one aspect, provided is an anti-TL1A antibody comprising a heavy chain variable region comprising an amino acid sequence at least about 85%, 90%, 91%, 92%, 93%, 94%, 95%, 96%, 97%, 98%, 99%, or 100% identical to SEQ ID NO: 1202; and a light chain variable region at least about 85%, 90%, 91%, 92%, 93%, 94%, 95%, 96%, 97%, 98%, 99%, or 100% identical to SEQ ID NO: 208 (AS12824). In one aspect, provided is an anti-TL1A antibody comprising a heavy chain variable region comprising an amino acid sequence at least about 85%, 90%, 91%, 92%, 93%, 94%, 95%, 96%, 97%, 98%, 99%, or 100% identical to SEQ ID NO: 1203; and a light chain variable region at least about 85%, 90%, 91%, 92%, 93%, 94%, 95%, 96%, 97%, 98%, 99%, or 100% identical to SEQ ID NO: 1266 (AS12823). In one aspect, provided is an anti-TL1A antibody comprising a heavy chain variable region comprising an amino acid sequence at least about 85%, 90%, 91%, 92%, 93%, 94%, 95%, 96%, 97%, 98%, 99%, or 100% identical to SEQ ID NO: 1204; and a light chain variable region at least about 85%, 90%, 91%, 92%, 93%, 94%, 95%, 96%, 97%, 98%, 99%, or 100% identical to SEQ ID NO: 1267 (AS12819). In one aspect, provided is an anti-TL1A antibody comprising a heavy chain variable region comprising an amino acid sequence at least about 85%, 90%, 91%, 92%, 93%, 94%, 95%, 96%, 97%, 98%, 99%, or 100% identical to SEQ ID NO: 1205; and a light chain variable region at least about 85%, 90%, 91%, 92%, 93%, 94%, 95%, 96%, 97%, 98%, 99%, or 100% identical to SEQ ID NO: 1268 (AS12816). In one aspect, provided is an anti-TL1A antibody comprising a heavy chain variable region comprising an amino acid sequence at least about 85%, 90%, 91%, 92%, 93%, 94%, 95%, 96%, 97%, 98%, 99%, or 100% identical to SEQ ID NO: 1206; and a light chain variable region at least about 85%, 90%, 91%, 92%, 93%, 94%, 95%, 96%, 97%, 98%, 99%, or 100% identical to SEQ ID NO: 1269 (AS12825). In one aspect, provided is an anti-TL1A antibody comprising a heavy chain variable region comprising an amino acid sequence at least about 85%, 90%, 91%, 92%, 93%, 94%, 95%, 96%, 97%, 98%, 99%, or 100% identical to SEQ ID NO: 1207; and a light chain variable region at least about 85%, 90%, 91%, 92%, 93%, 94%, 95%, 96%, 97%, 98%, 99%, or 100% identical to SEQ ID NO: 1270 (12835). In one aspect, provided is an anti-TL1A antibody comprising a heavy chain variable region comprising an amino acid sequence at least about 85%, 90%, 91%, 92%, 93%, 94%, 95%, 96%, 97%, 98%, 99%, or 100% identical to SEQ ID NO: 1208; and a light chain variable region at least about 85%, 90%, 91%, 92%, 93%, 94%, 95%, 96%, 97%, 98%, 99%, or 100% identical to SEQ ID NO: 202 (18-7 S93E). In one aspect, provided is an anti-TL1A antibody comprising a heavy chain variable region comprising an amino acid sequence at least about 85%, 90%, 91%, 92%, 93%, 94%, 95%, 96%, 97%, 98%, 99%, or 100% identical to SEQ ID NO: 1208; and a light chain variable region at least about 85%, 90%, 91%, 92%, 93%, 94%, 95%, 96%, 97%, 98%, 99%, or 100% identical to SEQ ID NO: 203 (18-7). In one aspect, provided is an anti-TL1A antibody comprising a heavy chain variable region comprising an amino acid sequence at least about 85%, 90%, 91%, 92%, 93%, 94%, 95%, 96%, 97%, 98%, 99%, or 100% identical to SEQ ID NO: 1208; and a light chain variable region at least about 85%, 90%, 91%, 92%, 93%, 94%, 95%, 96%, 97%, 98%, 99%, or 100% identical to SEQ ID NO: 1272 (18-7 S92D). In one aspect, provided is an anti-TL1A antibody comprising a heavy chain variable region comprising an amino acid sequence at least about 85%, 90%, 91%, 92%, 93%, 94%, 95%, 96%, 97%, 98%, 99%, or 100% identical to SEQ ID NO: 1208; and a light chain variable region at least about 85% 90% 91% 92%, 93%, 94%, 95%, 96%, 97%, 98%, 99%, or 100% identical to SEQ ID NO: 1273 (18-7 S92H). In one aspect, provided is an anti-TL1A antibody comprising a heavy chain variable region comprising an amino acid sequence at least about 85%, 90%, 91%, 92%, 93%, 94%, 95%, 96%, 97%, 98%, 99%, or 100% identical to SEQ ID NO: 1208; and a light chain variable region at least about 85%, 90%, 91%, 92%, 93%, 94%, 95%, 96%, 97%, 98%, 99%, or 100% identical to SEQ ID NO: 1274 (18-7 S92N). In one aspect, provided is an anti-TL1A antibody comprising a heavy chain variable region comprising an amino acid sequence at least about 85%, 90%, 91%, 92%, 93%, 94%, 95%, 96%, 97%, 98%, 99%, or 100% identical to SEQ ID NO: 1208; and a light chain variable region at least about 85% 90% 91% 92%, 93%, 94%, 95%, 96%, 97%, 98%, 99%, or 100% identical to SEQ ID NO: 1275 (18-7 S92Q). In one aspect, provided is an anti-TL1A antibody comprising a heavy chain variable region comprising an amino acid sequence at least about 85%, 90%, 91%, 92%, 93%, 94%, 95%, 96%, 97%, 98%, 99%, or 100% identical to SEQ ID NO: 1208; and a light chain variable region at least about 85%, 90%, 91%, 92%, 93%, 94%, 95%, 96%, 97%, 98%, 99%, or 100% identical to SEQ ID NO: 1276 (18-7 CDRv). In one aspect, provided is an anti-TL1A antibody comprising a heavy chain variable region comprising an amino acid sequence at least about 85%, 90%, 91%, 92%, 93%, 94%, 95%, 96%, 97%, 98%, 99%, or 100% identical to SEQ ID NO: 1209; and a light chain variable region at least about 85% 90% 91% 92%, 93%, 94%, 95%, 96%, 97%, 98%, 99%, or 100% identical to SEQ ID NO: 1271 (21-3). In one aspect, provided is an anti-TL1A antibody comprising a heavy chain variable region comprising an amino acid sequence at least about 85%, 90%, 91%, 92%, 93%, 94%, 95%, 96%, 97%, 98%, 99%, or 100% identical to SEQ ID NO: 1210; and a light chain variable region at least about 85%, 90%, 91%, 92%, 93%, 94%, 95%, 96%, 97%, 98%, 99%, or 100% identical to SEQ ID NO: 1271 (21-3 V102K). In one aspect, provided is an anti-TL1A antibody comprising a heavy chain variable region comprising an amino acid sequence at least about 85%, 90%, 91%, 92%, 93%, 94%, 95%, 96%, 97%, 98%, 99%, or 100% identical to SEQ ID NO: 1211; and a light chain variable region at least about 85% 90% 91% 92%, 93%, 94%, 95%, 96%, 97%, 98%, 99%, or 100% identical to SEQ ID NO: 1271 (21-3 V102M). In one aspect, provided is an anti-TL1A antibody comprising a heavy chain variable region comprising an amino acid sequence at least about 85%, 90%, 91%, 92%, 93%, 94%, 95%, 96%, 97%, 98%, 99%, or 100% identical to SEQ ID NO: 1212; and a light chain variable region at least about 85%, 90%, 91%, 92%, 93%, 94%, 95%, 96%, 97%, 98%, 99%, or 100% identical to SEQ ID NO: 1271 (21-3 V102Q). In one aspect, provided is an anti-TL1A antibody comprising a heavy chain variable region comprising an amino acid sequence at least about 85%, 90%, 91%, 92%, 93%, 94%, 95%, 96%, 97%, 98%, 99%, or 100% identical to SEQ ID NO: 1213; and a light chain variable region at least about 85%, 90%, 91%, 92%, 93%, 94%, 95%, 96%, 97%, 98%, 99%, or 100% identical to SEQ ID NO: 1271 (21-3 V102 W). In one aspect, provided is an anti-TL1A antibody comprising a heavy chain variable region comprising an amino acid sequence at least about 85%, 90%, 91%, 92%, 93%, 94%, 95%, 96%, 97%, 98%, 99%, or 100% identical to SEQ ID NO: 1214; and a light chain variable region at least about 85%, 90%, 91%, 92%, 93%, 94%, 95%, 96%, 97%, 98%, 99%, or 100% identical to SEQ ID NO: 1271 (21-3 CDRv). In one aspect, provided is an anti-TL1A antibody comprising a heavy chain variable region comprising an amino acid sequence at least about 85%, 90%, 91%, 92%, 93%, 94%, 95%, 96%, 97%, 98%, 99%, or 100% identical to SEQ ID NO: 1215; and a light chain variable region at least about 85%, 90%, 91%, 92%, 93%, 94%, 95%, 96%, 97%, 98%, 99%, or 100% identical to SEQ ID NO: 1271 (21-3 CDRv). In one aspect, provided is an anti-TL1A antibody comprising a heavy chain variable region comprising an amino acid sequence at least about 85%, 90%, 91%, 92%, 93%, 94%, 95%, 96%, 97%, 98%, 99%, or 100% identical to SEQ ID NO: 1216; and a light chain variable region at least about 85%, 90%, 91%, 92%, 93%, 94%, 95%, 96%, 97%, 98%, 99%, or 100% identical to SEQ ID NO: 202 (clone 2). In one aspect, provided is an anti-TL1A antibody comprising a heavy chain variable region comprising an amino acid sequence at least about 85%, 90%, 91%, 92%, 93%, 94%, 95%, 96%, 97%, 98%, 99%, or 100% identical to SEQ ID NO: 1216; and a light chain variable region at least about 85%, 90%, 91%, 92%, 93%, 94%, 95%, 96%, 97%, 98%, 99%, or 100% identical to SEQ ID NO: 1277 (clone 52). In one aspect, provided is an anti-TL1A antibody comprising a heavy chain variable region comprising an amino acid sequence at least about 85%, 90%, 91%, 92%, 93%, 94%, 95%, 96%, 97%, 98%, 99%, or 100% identical to SEQ ID NO: 1217; and a light chain variable region at least about 85%, 90%, 91%, 92%, 93%, 94%, 95%, 96%, 97%, 98%, 99%, or 100% identical to SEQ ID NO: 202 (clone 46). In one aspect, provided is an anti-TL1A antibody comprising a heavy chain variable region comprising an amino acid sequence at least about 85%, 90%, 91%, 92%, 93%, 94%, 95%, 96%, 97%, 98%, 99%, or 100% identical to SEQ ID NO: 1218; and a light chain variable region at least about 85%, 90%, 91%, 92%, 93%, 94%, 95%, 96%, 97%, 98%, 99%, or 100% identical to SEQ ID NO: 202 (clone 47). In one aspect, provided is an anti-TL1A antibody comprising a heavy chain variable region comprising an amino acid sequence at least about 85%, 90%, 91%, 92%, 93%, 94%, 95%, 96%, 97%, 98%, 99%, or 100% identical to SEQ ID NO: 1219; and a light chain variable region at least about 85%, 90%, 91%, 92%, 93%, 94%, 95%, 96%, 97%, 98%, 99%, or 100% identical to SEQ ID NO: 1275 (clone 14). In one aspect, provided is an anti-TL1A antibody comprising a heavy chain variable region comprising an amino acid sequence at least about 85%, 90%, 91%, 92%, 93%, 94%, 95%, 96%, 97%, 98%, 99%, or 100% identical to SEQ ID NO: 1220; and a light chain variable region at least about 85%, 90%, 91%, 92%, 93%, 94%, 95%, 96%, 97%, 98%, 99%, or 100% identical to SEQ ID NO: 1275 (clone 16L). In one aspect, provided is an anti-TL1A antibody comprising a heavy chain variable region comprising an amino acid sequence at least about 85%, 90%, 91%, 92%, 93%, 94%, 95%, 96%, 97%, 98%, 99%, or 100% identical to SEQ ID NO: 1221; and a light chain variable region at least about 85%, 90%, 91%, 92%, 93%, 94%, 95%, 96%, 97%, 98%, 99%, or 100% identical to SEQ ID NO: 1275 (clone 17L). In one aspect, provided is an anti-TL1A antibody comprising a heavy chain variable region comprising an amino acid sequence at least about 85%, 90%, 91%, 92%, 93%, 94%, 95%, 96%, 97%, 98%, 99%, or 100% identical to SEQ ID NO: 1222; and a light chain variable region at least about 85%, 90%, 91%, 92%, 93%, 94%, 95%, 96%, 97%, 98%, 99%, or 100% identical to SEQ ID NO: 1275 (clone 17L-1). In one aspect, provided is an anti-TL1A antibody comprising a heavy chain variable region comprising an amino acid sequence at least about 85%, 90%, 91%, 92%, 93%, 94%, 95%, 96%, 97%, 98%, 99%, or 100% identical to SEQ ID NO: 1223; and a light chain variable region at least about 85%, 90%, 91%, 92%, 93%, 94%, 95%, 96%, 97%, 98%, 99%, or 100% identical to SEQ ID NO: 202 (clone 23). In one aspect, provided is an anti-TL1A antibody comprising a heavy chain variable region comprising an amino acid sequence at least about 85%, 90%, 91%, 92%, 93%, 94%, 95%, 96%, 97%, 98%, 99%, or 100% identical to SEQ ID NO: 1224; and a light chain variable region at least about 85%, 90%, 91%, 92%, 93%, 94%, 95%, 96%, 97%, 98%, 99%, or 100% identical to SEQ ID NO: 202 (clone 53). In one aspect, provided is an anti-TL1A antibody comprising a heavy chain variable region comprising an amino acid sequence at least about 85%, 90%, 91%, 92%, 93%, 94%, 95%, 96%, 97%, 98%, 99%, or 100% identical to SEQ ID NO: 1224; and a light chain variable region at least about 85%, 90%, 91%, 92%, 93%, 94%, 95%, 96%, 97%, 98%, 99%, or 100% identical to SEQ ID NO: 1277 (clone E1). In one aspect, provided is an anti-TL1A antibody comprising a heavy chain variable region comprising an amino acid sequence at least about 85%, 90%, 91%, 92%, 93%, 94%, 95%, 96%, 97%, 98%, 99%, or 100% identical to SEQ ID NO: 1225; and a light chain variable region at least about 85%, 90%, 91%, 92%, 93%, 94%, 95%, 96%, 97%, 98%, 99%, or 100% identical to SEQ ID NO: 1275 (clone 3-17L V-A). In one aspect, provided is an anti-TL1A antibody comprising a heavy chain variable region comprising an amino acid sequence at least about 85%, 90%, 91%, 92%, 93%, 94%, 95%, 96%, 97%, 98%, 99%, or 100% identical to SEQ ID NO: 1226; and a light chain variable region at least about 85%, 90%, 91%, 92%, 93%, 94%, 95%, 96%, 97%, 98%, 99%, or 100% identical to SEQ ID NO: 1275 (clone 3-17L). In one aspect, provided is an anti-TL1A antibody comprising a heavy chain variable region comprising an amino acid sequence at least about 85%, 90%, 91%, 92%, 93%, 94%, 95%, 96%, 97%, 98%, 99%, or 100% identical to SEQ ID NO: 1227; and a light chain variable region at least about 85%, 90%, 91%, 92%, 93%, 94%, 95%, 96%, 97%, 98%, 99%, or 100% identical to SEQ ID NO: 203 (clone L8mod). In one aspect, provided is an anti-TL1A antibody comprising a heavy chain variable region comprising an amino acid sequence at least about 85%, 90%, 91%, 92%, 93%, 94%, 95%, 96%, 97%, 98%, 99%, or 100% identical to SEQ ID NO: 1209; and a light chain variable region at least about 85%, 90%, 91%, 92%, 93%, 94%, 95%, 96%, 97%, 98%, 99%, or 100% identical to SEQ ID NO: 203 (clone L8). In one aspect, provided is an anti-TL1A antibody comprising a heavy chain variable region comprising an amino acid sequence at least about 85%, 90%, 91%, 92%, 93%, 94%, 95%, 96%, 97%, 98%, 99%, or 100% identical to SEQ ID NO: 1228; and a light chain variable region at least about 85%, 90%, 91%, 92%, 93%, 94%, 95%, 96%, 97%, 98%, 99%, or 100% identical to SEQ ID NO: 203 (clone X-V). In one aspect, provided is an anti-TL1A antibody comprising a heavy chain variable region comprising an amino acid sequence at least about 85%, 90%, 91%, 92%, 93%, 94%, 95%, 96%, 97%, 98%, 99%, or 100% identical to SEQ ID NO: 1229; and a light chain variable region at least about 85%, 90%, 91%, 92%, 93%, 94%, 95%, 96%, 97%, 98%, 99%, or 100% identical to SEQ ID NO: 203 (clone X). In one aspect, provided is an anti-TL1A antibody comprising a heavy chain variable region comprising an amino acid sequence at least about 85%, 90%, 91%, 92%, 93%, 94%, 95%, 96%, 97%, 98%, 99%, or 100% identical to SEQ ID NO: 1229; and a light chain variable region at least about 85%, 90%, 91%, 92%, 93%, 94%, 95%, 96%, 97%, 98%, 99%, or 100% identical to SEQ ID NO: 1278 (clone XL3-6). In one aspect, provided is an anti-TL1A antibody comprising a heavy chain variable region comprising an amino acid sequence at least about 85%, 90%, 91%, 92%, 93%, 94%, 95%, 96%, 97%, 98%, 99%, or 100% identical to SEQ ID NO: 1229; and a light chain variable region at least about 85%, 90%, 91%, 92%, 93%, 94%, 95%, 96%, 97%, 98%, 99%, or 100% identical to SEQ ID NO: 1279 (clone XL3-10). In one aspect, provided is an anti-TL1A antibody comprising a heavy chain variable region comprising an amino acid sequence at least about 85%, 90%, 91%, 92%, 93%, 94%, 95%, 96%, 97%, 98%, 99%, or 100% identical to SEQ ID NO: 1229; and a light chain variable region at least about 85%, 90%, 91%, 92%, 93%, 94%, 95%, 96%, 97%, 98%, 99%, or 100% identical to SEQ ID NO: 207 (clone XL3-15). In one aspect, provided is an anti-TL1A antibody comprising a heavy chain variable region comprising an amino acid sequence at least about 85%, 90%, 91%, 92%, 93%, 94%, 95%, 96%, 97%, 98%, 99%, or 100% identical to SEQ ID NO: 1229; and a light chain variable region at least about 85%, 90%, 91%, 92%, 93%, 94%, 95%, 96%, 97%, 98%, 99%, or 100% identical to SEQ ID NO: 204 (clone L3-13). In one aspect, provided is an anti-TL1A antibody comprising a heavy chain variable region comprising an amino acid sequence at least about 85%, 90%, 91%, 92%, 93%, 94%, 95%, 96%, 97%, 98%, 99%, or 100% identical to SEQ ID NO: 1230; and a light chain variable region at least about 85%, 90%, 91%, 92%, 93%, 94%, 95%, 96%, 97%, 98%, 99%, or 100% identical to SEQ ID NO: 203 (clone H3-1). In one aspect, provided is an anti-TL1A antibody comprising a heavy chain variable region comprising an amino acid sequence at least about 85%, 90%, 91%, 92%, 93%, 94%, 95%, 96%, 97%, 98%, 99%, or 100% identical to SEQ ID NO: 1231; and a light chain variable region at least about 85%, 90%, 91%, 92%, 93%, 94%, 95%, 96%, 97%, 98%, 99%, or 100% identical to SEQ ID NO: 203 (clone H2-2). In one aspect, provided is an anti-TL1A antibody comprising a heavy chain variable region comprising an amino acid sequence at least about 85%, 90%, 91%, 92%, 93%, 94%, 95%, 96%, 97%, 98%, 99%, or 100% identical to SEQ ID NO: 1232; and a light chain variable region at least about 85%, 90%, 91%, 92%, 93%, 94%, 95%, 96%, 97%, 98%, 99%, or 100% identical to SEQ ID NO: 203 (clone H2-5). In one aspect, provided is an anti-TL1A antibody comprising a heavy chain variable region comprising an amino acid sequence at least about 85%, 90%, 91%, 92%, 93%, 94%, 95%, 96%, 97%, 98%, 99%, or 100% identical to SEQ ID NO: 1233; and a light chain variable region at least about 85%, 90%, 91%, 92%, 93%, 94%, 95%, 96%, 97%, 98%, 99%, or 100% identical to SEQ ID NO: 1280 (M1). In one aspect, provided is an anti-TL1A antibody comprising a heavy chain variable region comprising an amino acid sequence at least about 85%, 90%, 91%, 92%, 93%, 94%, 95%, 96%, 97%, 98%, 99%, or 100% identical to SEQ ID NO: 1234; and a light chain variable region at least about 85% 90% 91% 92%, 93%, 94%, 95%, 96%, 97%, 98%, 99%, or 100% identical to SEQ ID NO: 1281 (M2). In one aspect, provided is an anti-TL1A antibody comprising a heavy chain variable region comprising an amino acid sequence at least about 85%, 90%, 91%, 92%, 93%, 94%, 95%, 96%, 97%, 98%, 99%, or 100% identical to SEQ ID NO: 1235; and a light chain variable region at least about 85%, 90%, 91%, 92%, 93%, 94%, 95%, 96%, 97%, 98%, 99%, or 100% identical to SEQ ID NO: 1282 (M3). In one aspect, provided is an anti-TL1A antibody comprising a heavy chain variable region comprising an amino acid sequence at least about 85%, 90%, 91%, 92%, 93%, 94%, 95%, 96%, 97%, 98%, 99%, or 100% identical to SEQ ID NO: 1235; and a light chain variable region at least about 85% 90%, 91%, 92%, 93%, 94%, 95%, 96%, 97%, 98%, 99%, or 100% identical to SEQ ID NO: 1283 (M3). In one aspect, provided is an anti-TL1A antibody comprising a heavy chain variable region comprising an amino acid sequence at least about 85%, 90%, 91%, 92%, 93%, 94%, 95%, 96%, 97%, 98%, 99%, or 100% identical to SEQ ID NO: 1237; and a light chain variable region at least about 85%, 90%, 91%, 92%, 93%, 94%, 95%, 96%, 97%, 98%, 99%, or 100% identical to SEQ ID NO: 1284 (M4). In one aspect, provided is an anti-TL1A antibody comprising a heavy chain variable region comprising an amino acid sequence at least about 85%, 90%, 91%, 92%, 93%, 94%, 95%, 96%, 97%, 98%, 99%, or 100% identical to SEQ ID NO: 1238; and a light chain variable region at least about 85%, 90%, 91%, 92%, 93%, 94%, 95%, 96%, 97%, 98%, 99%, or 100% identical to SEQ ID NO: 1285 (M5). In one aspect, provided is an anti-TL1A antibody comprising a heavy chain variable region comprising an amino acid sequence at least about 85%, 90%, 91%, 92%, 93%, 94%, 95%, 96%, 97%, 98%, 99%, or 100% identical to any one of SEQ ID NOS: 1239-1242; and a light chain variable region at least about 85%, 90%, 91%, 92%, 93%, 94%, 95%, 96%, 97%, 98%, 99%, or 100% identical to any one of SEQ ID NOS: 1286-1293 (M6). In one aspect, provided is an anti-TL1A antibody comprising a heavy chain variable region comprising an amino acid sequence at least about 85%, 90%, 91%, 92%, 93%, 94%, 95%, 96%, 97%, 98%, 99%, or 100% identical to any one of SEQ ID NOS: 1243-1247; and a light chain variable region at least about 85%, 90%, 91%, 92%, 93%, 94%, 95%, 96%, 97%, 98%, 99%, or 100% identical to any one of SEQ ID NOS: 1294-1297 (M7). In one aspect, provided is an anti-TL1A antibody comprising a heavy chain variable region comprising an amino acid sequence at least about 85%, 90%, 91%, 92%, 93%, 94%, 95%, 96%, 97%, 98%, 99%, or 100% identical to any one of SEQ ID NOS: 1248-1259; and a light chain variable region at least about 85% 90%, 91%, 92%, 93%, 94%, 95%, 96%, 97%, 98%, 99%, or 100% identical to any one of SEQ ID NOS: 1298-1312 (M8). In one aspect, provided is an anti-TL1A antibody comprising a heavy chain variable region comprising an amino acid sequence at least about 85%, 90%, 91%, 92%, 93%, 94%, 95%, 96%, 97%, 98%, 99%, or 100% identical to SEQ ID NO: 1260; and a light chain variable region at least about 85%, 90%, 91%, 92%, 93%, 94%, 95%, 96%, 97%, 98%, 99%, or 100% identical to SEQ ID NO: 1313 (M9). In one aspect, provided is an anti-TL1A antibody comprising a heavy chain variable region comprising an amino acid sequence at least about 85%, 90%, 91%, 92%, 93%, 94%, 95%, 96%, 97%, 98%, 99%, or 100% identical to SEQ ID NO: 1261; and a light chain variable region at least about 85% 90% 91% 92%, 93%, 94%, 95%, 96%, 97%, 98%, 99%, or 100% identical to SEQ ID NO: 1314 (M10). In one aspect, provided is an anti-TL1A antibody comprising a heavy chain variable region comprising an amino acid sequence at least about 85%, 90%, 91%, 92%, 93%, 94%, 95%, 96%, 97%, 98%, 99%, or 100% identical to SEQ ID NO: 1262; and a light chain variable region at least about 85%, 90%, 91%, 92%, 93%, 94%, 95%, 96%, 97%, 98%, 99%, or 100% identical to SEQ ID NO: 1315 (M11). In one aspect, provided is an anti-TL1A antibody comprising a heavy chain variable region comprising an amino acid sequence at least about 85%, 90%, 91%, 92%, 93%, 94%, 95%, 96%, 97%, 98%, 99%, or 100% identical to SEQ ID NO: 1263; and a light chain variable region at least about 85% 90%, 91%, 92%, 93%, 94%, 95%, 96%, 97%, 98%, 99%, or 100% identical to SEQ ID NO: 1316 (M12). In one aspect, provided is an anti-TL1A antibody comprising a heavy chain variable region comprising an amino acid sequence at least about 85%, 90%, 91%, 92%, 93%, 94%, 95%, 96%, 97%, 98%, 99%, or 100% identical to SEQ ID NO: 301; and a light chain variable region at least about 85%, 90%, 91%, 92%, 93%, 94%, 95%, 96%, 97%, 98%, 99%, or 100% identical to SEQ ID NO: 303. In one aspect, provided is an anti-TL1A antibody comprising a heavy chain variable region comprising an amino acid sequence at least about 85%, 90%, 91%, 92%, 93%, 94%, 95%, 96%, 97%, 98%, 99%, or 100% identical to SEQ ID NO: 302; and a light chain variable region at least about 85%, 90%, 91%, 92%, 93%, 94%, 95%, 96%, 97%, 98%, 99%, or 100% identical to SEQ ID NO: 303. In one aspect, provided is an anti-TL1A antibody comprising a heavy chain variable region comprising an amino acid sequence at least about 85%, 90%, 91%, 92%, 93%, 94%, 95%, 96%, 97%, 98%, 99%, or 100% identical to SEQ ID NO: 1301; and a light chain variable region at least about 85% 90% 91% 92%, 93%, 94%, 95%, 96%, 97%, 98%, 99%, or 100% identical to SEQ ID NO: 303. In one aspect, provided is an anti-TL1A antibody comprising a heavy chain variable region comprising an amino acid sequence at least about 85%, 90%, 91%, 92%, 93%, 94%, 95%, 96%, 97%, 98%, 99%, or 100% identical to SEQ ID NO: 1302; and a light chain variable region at least about 85%, 90%, 91%, 92%, 93%, 94%, 95%, 96%, 97%, 98%, 99%, or 100% identical to SEQ ID NO: 303.

### Exemplary Anti-TL1A Constant Regions

[1018] In some embodiments, one or more amino acid modifications may be introduced into the Fragment crystallizable (Fc) region of a human or humanized antibody, thereby generating an Fc region variant. An Fc region may comprise a C-terminal region of an immunoglobulin heavy chain that comprises a hinge region, CH2 domain, CH3 domain, or any combination thereof. As used herein, an Fc region includes native sequence Fc regions and variant Fc regions. The Fc region variant may comprise a human Fc region sequence (e.g., a human IgG1, IgG2, IgG3 or IgG4 Fc region) comprising an amino acid modification (e.g., a substitution, addition, or deletion) at one or more amino acid positions. In an exemplary embodiment, the Fc region comprises any one of SEQ ID NOS: 320-362, 401-413, 501-515.

[1019] In some embodiments, antibodies of this disclosure have a reduced effector function as compared to a human IgG. Effector function refers to a biological event resulting from the interaction of an antibody Fc region with an Fc receptor or ligand. Non-limiting effector functions include C1 q binding, complement dependent cytotoxicity (CDC), Fc receptor binding, antibody-dependent cell-mediated cytotoxicity (ADCC), antibody-dependent cellular phagocytosis (ADCP), cytokine secretion, immune complex-mediated antigen uptake by antigen presenting cells, down regulation of cell surface receptors (e.g. B cell receptor), and B cell activation. In some cases, antibody-dependent cell-mediated cytotoxicity (ADCC) refers to a cell-mediated reaction in which nonspecific cytotoxic cells expressing Fc receptors (e.g., natural killer cells, neutrophils, macrophages) recognize bound antibody on a target cell, subsequently causing lysis of the target cell. In some cases, complement dependent cytotoxicity (CDC) refers to lysing of a target cells in the presence of complement, where the complement action pathway is initiated by the binding of C1 q to antibody bound with the target.

[1020] Some Fc regions have a natural lack of effector function, and some Fc regions can comprise mutations that reduce effector functions. For instance, IgG4 has low ADCC and CDC activities and IgG2 has low ADCC activity.

[1021] The disclosure provides antibodies comprising Fe regions characterized by exhibiting ADCC that is reduced by at least about 30%, at least about 40%, at least about 50%, at least about 60%, at least about 70% or more as compared to an antibody comprising a non-variant Fe region, i.e., an antibody with the same sequence identity but for the substitution(s) that decrease ADCC (such as human IgG1, SEQ ID NO: 320). The disclosure provides antibodies comprising Fc regions characterized by exhibiting CDC that is reduced by at least about 30%, at least about 40%, at least about 50%, at least about 60%, at least about 70% or more as compared to an antibody comprising a non-variant Fe region, i.e., an antibody with the same sequence identity but for the substitution(s) that decrease CDC (such as human IgG1, SEQ ID NO: 320). In certain embodiments, the antibodies of this disclosure have reduced effector function as compared with human IgG1. Measurement of effector function may be performed as described in Example 3.

[1022] Non-limiting examples of Fc mutations in IgG1 that may reduce ADCC and/or CDC include substitutions at one or more of positions: 231, 232, 234, 235, 236, 237, 238, 239, 264, 265, 267, 269, 270, 297, 299, 318, 320, 322, 325, 327, 328, 329, 330, and 331 in IgG1, where the numbering system of the constant region is that of the EU index as set forth by Kabat. In certain embodiments, the antibodies of this disclosure have reduced effector function as compared with human IgG1.

[1023] In some embodiments, an antibody comprises an IgG1 Fc region comprising an N297A substitution, according to the Kabat numbering system. In some embodiments, an antibody comprises an IgG1 Fc region comprising an N297Q substitution, according to the Kabat numbering system. In some embodiments, an antibody comprises an IgG1 Fc region comprising an N297D substitution, according to the Kabat numbering system. In some embodiments, an antibody comprises an IgG1 Fc region comprising an D265A substitution, according to the Kabat numbering system. In some embodiments, an antibody comprises an IgG1 Fc region comprising an S228P substitution, according to the Kabat numbering system. In some embodiments, an antibody comprises an IgG1 Fc region comprising an L235A substitution, according to the Kabat numbering system. In some embodiments, an antibody comprises an IgG1 Fc region comprising an L237A substitution, according to the Kabat numbering system. In some embodiments, an antibody comprises an IgG1 Fc region comprising an L234A substitution, according to the Kabat numbering system. In some embodiments, an antibody comprises an IgG1 Fc region comprising an E233P substitution, according to the Kabat numbering system. In some embodiments, an antibody comprises an IgG1 Fc region comprising an L234V substitution, according to the Kabat numbering system. In some embodiments, an antibody comprises an IgG1 Fc region comprising an C236 deletion, according to the Kabat numbering system. In some embodiments, an antibody comprises an IgG1 Fc region comprising a P238A substitution, according to the Kabat numbering system. In some embodiments, an antibody comprises an IgG1 Fc region comprising an A327Q substitution, according to the Kabat numbering system. In some embodiments, an antibody comprises an IgG1 Fc region comprising a P329A substitution, according to the Kabat numbering system. In some embodiments, an antibody comprises an IgG1 Fc region comprising an P329G substitution, according to the Kabat numbering system. In some embodiments, an antibody comprises an IgG1 Fc region comprising an L235E substitution, according to the Kabat numbering system. In some embodiments, an antibody comprises an IgG1 Fc region comprising an P331 S substitution, according to the Kabat numbering system. In some embodiments, an antibody comprises an IgG1 Fc region comprising an L234F substitution, according to the Kabat numbering system. In some embodiments, an antibody comprises an IgG1 Fc region comprising a 235G substitution, according to the Kabat numbering system. In some embodiments, an antibody comprises an IgG1 Fc region comprising an 235Q substitution, according to the Kabat numbering system. In some embodiments, an antibody comprises an IgG1 Fc region comprising an 235R substitution, according to the Kabat numbering system. In some embodiments, an antibody comprises an IgG1 Fc region comprising an 235 S substitution, according to the Kabat numbering system. In some embodiments, an antibody comprises an IgG1 Fc region comprising an 236F substitution, according to the Kabat numbering system. In some embodiments, an antibody comprises an IgG1 Fc region comprising an 236R substitution, according to the Kabat numbering system. In some embodiments, an antibody comprises an IgG1 Fc region comprising an 237E substitution, according to the Kabat numbering system. In some embodiments, an antibody comprises an IgG1 Fc region comprising an 237K substitution, according to the Kabat numbering system. In some embodiments, an antibody comprises an IgG1 Fc region comprising an 237N substitution, according to the Kabat numbering system. In some embodiments, an antibody comprises an IgG1 Fc region comprising an 237R substitution, according to the Kabat numbering system. In some embodiments, an antibody comprises an IgG1 Fc region comprising an 238A substitution, according to the Kabat numbering system. In some embodiments, an antibody comprises an IgG1 Fc region comprising an 238E substitution, according to the Kabat numbering system. In some embodiments, an antibody comprises an IgG1 Fc region comprising an 238G substitution, according to the Kabat numbering system. In some embodiments, an antibody comprises an IgG1 Fc region comprising an 23 8H substitution, according to the Kabat numbering system. In some embodiments, an antibody comprises an IgG1 Fc region comprising an 238I substitution, according to the Kabat numbering system. In some embodiments, an antibody comprises an IgG1 Fc region comprising an 238V substitution, according to the Kabat numbering system. In some embodiments, an antibody comprises an IgG1 Fc region comprising an 238 W substitution, according to the Kabat numbering system. In some embodiments, an antibody comprises an IgG1 Fc region comprising an 238Y substitution, according to the Kabat numbering system. In some embodiments, an antibody comprises an IgG1 Fc region comprising an 248A substitution, according to the Kabat numbering system. In some embodiments, an antibody comprises an IgG1 Fc region comprising an 254D substitution, according to the Kabat numbering system. In some embodiments, an antibody comprises an IgG1 Fc region comprising an 254E substitution, according to the Kabat numbering system. In some embodiments, an antibody comprises an IgG1 Fc region comprising an 254G substitution, according to the Kabat numbering system. In some embodiments, an antibody comprises an IgG1 Fc region comprising an 254H substitution, according to the Kabat numbering system. In some embodiments, an antibody comprises an IgG1 Fc region comprising an 254I substitution, according to the Kabat numbering system. In some embodiments, an antibody comprises an IgG1 Fc region comprising an 254N substitution, according to the Kabat numbering system. In some embodiments, an antibody comprises an IgG1 Fc region comprising an 254P substitution, according to the Kabat numbering system. In some embodiments, an antibody comprises an IgG1 Fc region comprising an 254Q substitution, according to the Kabat numbering system. In some embodiments, an antibody comprises an IgG1 Fc region comprising an 254T substitution, according to the Kabat numbering system. In some embodiments, an antibody comprises an IgG1 Fc region comprising an 254V substitution, according to the Kabat numbering system. In some embodiments, an antibody comprises an IgG1 Fc region comprising an 255N substitution, according to the Kabat numbering system. In some embodiments, an antibody comprises an IgG1 Fc region comprising an 256H substitution, according to the Kabat numbering system. In some embodiments, an antibody comprises an IgG1 Fc region comprising an 256K substitution, according to the Kabat numbering system. In some embodiments, an antibody comprises an IgG1 Fc region comprising an 256R substitution, according to the Kabat numbering system. In some embodiments, an antibody comprises an IgG1 Fc region comprising an 256V substitution, according to the Kabat numbering system. In some embodiments, an antibody comprises an IgG1 Fc region comprising an 264S substitution, according to the Kabat numbering system. In some embodiments, an antibody comprises an IgG1 Fc region comprising an 265H substitution, according to the Kabat numbering system. In some embodiments, an antibody comprises an IgG1 Fc region comprising an 265K substitution, according to the Kabat numbering system. In some embodiments, an antibody comprises an IgG1 Fc region comprising an 265 S substitution, according to the Kabat numbering system. In some embodiments, an antibody comprises an IgG1 Fc region comprising an 265Y substitution, according to the Kabat numbering system. In some embodiments, an antibody comprises an IgG1 Fc region comprising an 267G substitution, according to the Kabat numbering system. In some embodiments, an antibody comprises an IgG1 Fc region comprising an 267H substitution, according to the Kabat numbering system. In some embodiments, an antibody comprises an IgG1 Fc region comprising an 267I substitution, according to the Kabat numbering system. In some embodiments, an antibody comprises an IgG1 Fc region comprising an 267K substitution, according to the Kabat numbering system. In some embodiments, an antibody comprises an IgG1 Fc region comprising an 268K substitution, according to the Kabat numbering system. In some embodiments, an antibody comprises an IgG1 Fc region comprising an 269N substitution, according to the Kabat numbering system. In some embodiments, an antibody comprises an IgG1 Fc region comprising an 269Q substitution, according to the Kabat numbering system. In some embodiments, an antibody comprises an IgG1 Fc region comprising an 270A substitution, according to the Kabat numbering system. In some embodiments, an antibody comprises an IgG1 Fc region comprising an 270G substitution, according to the Kabat numbering system. In some embodiments, an antibody comprises an IgG1 Fc region comprising an 270M substitution, according to the Kabat numbering system. In some embodiments, an antibody comprises an IgG1 Fc region comprising an 270N substitution, according to the Kabat numbering system. In some embodiments, an antibody comprises an IgG1 Fc region comprising an 271T substitution, according to the Kabat numbering system. In some embodiments, an antibody comprises an IgG1 Fc region comprising an 272N substitution, according to the Kabat numbering system. In some embodiments, an antibody comprises an IgG1 Fc region comprising an 279F substitution, according to the Kabat numbering system. In some embodiments, an antibody comprises an IgG1 Fc region comprising an 279K substitution, according to the Kabat numbering system. In some embodiments, an antibody comprises an IgG1 Fc region comprising an 279L substitution, according to the Kabat numbering system. In some embodiments, an antibody comprises an IgG1 Fc region comprising an 292E substitution, according to the Kabat numbering system. In some embodiments, an antibody comprises an IgG1 Fc region comprising an 292F substitution, according to the Kabat numbering system. In some embodiments, an antibody comprises an IgG1 Fc region comprising an 292G substitution, according to the Kabat numbering system. In some embodiments, an antibody comprises an IgG1 Fc region comprising an 292I substitution, according to the Kabat numbering system. In some embodiments, an antibody comprises an IgG1 Fc region comprising an 293 S substitution, according to the Kabat numbering system. In some embodiments, an antibody comprises an IgG1 Fc region comprising an 301 W substitution, according to the Kabat numbering system. In some embodiments, an antibody comprises an IgG1 Fc region comprising an 304E substitution, according to the Kabat numbering system. In some embodiments, an antibody comprises an IgG1 Fc region comprising an 311E substitution, according to the Kabat numbering system. In some embodiments, an antibody comprises an IgG1 Fc region comprising an 311G substitution, according to the Kabat numbering system. In some embodiments, an antibody comprises an IgG1 Fc region comprising an 311S substitution, according to the Kabat numbering system. In some embodiments, an antibody comprises an IgG1 Fc region comprising an 316F substitution, according to the Kabat numbering system. In some embodiments, an antibody comprises an IgG1 Fc region comprising an 327T substitution, according to the Kabat numbering system. In some embodiments, an antibody comprises an IgG1 Fc region comprising an 328V substitution, according to the Kabat numbering system. In some embodiments, an antibody comprises an IgG1 Fc region comprising an 329Y substitution, according to the Kabat numbering system. In some embodiments, an antibody comprises an IgG1 Fc region comprising an 330R substitution, according to the Kabat numbering system. In some embodiments, an antibody comprises an IgG1 Fc region comprising an 339E substitution, according to the Kabat numbering system. In some embodiments, an antibody comprises an IgG1 Fc region comprising an 339L substitution, according to the Kabat numbering system. In some embodiments, an antibody comprises an IgG1 Fc region comprising an 343I substitution, according to the Kabat numbering system. In some embodiments, an antibody comprises an IgG1 Fc region comprising an 343V substitution, according to the Kabat numbering system. In some embodiments, an antibody comprises an IgG1 Fc region comprising an 373A substitution, according to the Kabat numbering system. In some embodiments, an antibody comprises an IgG1 Fc region comprising an 373G substitution, according to the Kabat numbering system. In some embodiments, an antibody comprises an IgG1 Fc region comprising an 373S substitution, according to the Kabat numbering system. In some embodiments, an antibody comprises an IgG1 Fc region comprising an 376E substitution, according to the Kabat numbering system. In some embodiments, an antibody comprises an IgG1 Fc region comprising an 376 W substitution, according to the Kabat numbering system. In some embodiments, an antibody comprises an IgG1 Fc region comprising an 376Y substitution, according to the Kabat numbering system. In some embodiments, an antibody comprises an IgG1 Fc region comprising an 380D substitution, according to the Kabat numbering system. In some embodiments, an antibody comprises an IgG1 Fc region comprising an 382D substitution, according to the Kabat numbering system. In some embodiments, an antibody comprises an IgG1 Fc region comprising an 382P substitution, according to the Kabat numbering system. In some embodiments, an antibody comprises an IgG1 Fc region comprising an 385P substitution, according to the Kabat numbering system. In some embodiments, an antibody comprises an IgG1 Fc region comprising an 424H substitution, according to the Kabat numbering system. In some embodiments, an antibody comprises an IgG1 Fc region comprising an 424M substitution, according to the Kabat numbering system. In some embodiments, an antibody comprises an IgG1 Fc region comprising an 424V substitution, according to the Kabat numbering system. In some embodiments, an antibody comprises an IgG1 Fc region comprising an 434I substitution, according to the Kabat numbering system. In some embodiments, an antibody comprises an IgG1 Fc region comprising an 438G substitution, according to the Kabat numbering system. In some embodiments, an antibody comprises an IgG1 Fc region comprising an 439E substitution, according to the Kabat numbering system. In some embodiments, an antibody comprises an IgG1 Fc region comprising an 439H substitution, according to the Kabat numbering system. In some embodiments, an antibody comprises an IgG1 Fc region comprising an 439Q substitution, according to the Kabat numbering system. In some embodiments, an antibody comprises an IgG1 Fc region comprising an 440A substitution, according to the Kabat numbering system. In some embodiments, an antibody comprises an IgG1 Fc region comprising an 440D substitution, according to the Kabat numbering system. In some embodiments, an antibody comprises an IgG1 Fc region comprising an 440E substitution, according to the Kabat numbering system. In some embodiments, an antibody comprises an IgG1 Fc region comprising an 440F substitution, according to the Kabat numbering system. In some embodiments, an antibody comprises an IgG1 Fc region comprising an 440M substitution, according to the Kabat numbering system. In some embodiments, an antibody comprises an IgG1 Fc region comprising an 440T Fc region substitution, according to the Kabat numbering system. In some embodiments, an antibody comprises an IgG1 Fc region comprising an 440V substitution, according to the Kabat numbering system.

[1024] In some embodiments, an antibody comprises a Fc region selected from the representative sequences disclosed in Table 3 or 20 In some embodiments, an antibody comprises an IgG1 Fc region comprising E233P, according to the Kabat numbering system. In some embodiments, an antibody comprises an IgG4 Fc region comprising S228P and L235E. In some embodiments, an antibody comprises an IgG1 Fc region comprising L235E, according to the Kabat numbering system. In some embodiments, an antibody comprises an IgG1 Fc region comprising L234A and L235A, according to the Kabat numbering system. In some embodiments, an antibody comprises an IgG1 Fc region comprising L234A, L235A, and G237A, according to the Kabat numbering system. In some embodiments, an antibody comprises an IgG1 Fc region comprising L234A, L235A, P329G, according to the Kabat numbering system. In some embodiments, an antibody comprises an IgG1 Fc region comprising L234F, L235E, and P331S, according to the Kabat numbering system. In some embodiments, an antibody comprises an IgG1 Fc region comprising L234A, L235E, and G237A, according to the Kabat numbering system. In some embodiments, an antibody comprises an IgG1 Fc region comprising L234A, L235E, G237A, and P331S, according to the Kabat numbering system. In some embodiments, an antibody comprises an IgG1 Fc region comprising L234A, L235A, G237A, P238S, H268A, A330S, and P331S (IgG16), according to the Kabat numbering system. In some embodiments, an antibody comprises an IgG1 Fc region comprising L234A, L235A, and P329A, according to the Kabat numbering system. In some embodiments, an antibody comprises an IgG1 Fc region comprising G236R and L328R, according to the Kabat numbering system. In some embodiments, an antibody comprises an IgG1 Fc region comprising G237A, according to the Kabat numbering system. In some embodiments, an antibody comprises an IgG1 Fc region comprising F241A, according to the Kabat numbering system. In some embodiments, an antibody comprises an IgG1 Fc region comprising V264A, according to the Kabat numbering system. In some embodiments, an antibody comprises an IgG1 Fc region comprising D265A, according to the Kabat numbering system. In some embodiments, an antibody comprises an IgG1 Fc region comprising D265A and N297A, according to the Kabat numbering system. In some embodiments, an antibody comprises an IgG1 Fc region comprising D265A and N297G, according to the Kabat numbering system. In some embodiments, an antibody comprises an IgG1 Fc region comprising D270A, according to the Kabat numbering system. In some embodiments, an antibody comprises an IgG1 Fc region comprising N297A, according to the Kabat numbering system. In some embodiments, an antibody comprises an IgG1 Fc region comprising N297G, according to the Kabat numbering system. In some embodiments, an antibody comprises an IgG1 Fc region comprising N297D, according to the Kabat numbering system. In some embodiments, an antibody comprises an IgG1 Fc region comprising N297Q, according to the Kabat numbering system. In some embodiments, an antibody comprises an IgG1 Fc region comprising P329A, according to the Kabat numbering system. In some embodiments, an antibody comprises an IgG1 Fc region comprising P329G, according to the Kabat numbering system. In some embodiments, an antibody comprises an IgG1 Fc region comprising P329R, according to the Kabat numbering system. In some embodiments, an antibody comprises an IgG1 Fc region comprising A330L, according to the Kabat numbering system. In some embodiments, an antibody comprises an IgG1 Fc region comprising P331A, according to the Kabat numbering system. In some embodiments, an antibody comprises an IgG1 Fc region comprising P331 S, according to the Kabat numbering system. In some embodiments, an antibody comprises an IgG2 Fc region. In some embodiments, an antibody comprises an IgG4 Fc region. In some embodiments, an antibody comprises an IgG4 Fc region comprising S228P, according to the Kabat numbering system. In some embodiments, an antibody comprises an IgG4 Fc region comprising S228P, F234A, and L235A, according to the Kabat numbering system. In some embodiments, an antibody comprises an IgG2-IgG4 cross-subclass (IgG2/G4) Fc region. In some embodiments, an antibody comprises an IgG2-IgG3 cross-subclass Fe region. In some embodiments, an antibody comprises an IgG2 Fc region comprising H268Q, V309L, A330S, and P331S, according to the Kabat numbering system. In some embodiments, an antibody comprises an IgG2 Fc region comprising V234A, G237A, P238S, H268A, V309L, A330S, and P331S, according to the Kabat numbering system. In some embodiments, an antibody comprises a Fc region comprising high mannose glycosylation.

[1025] In some embodiments, an antibody comprises an IgG4 Fc region comprising a S228P substitution, according to the Kabat numbering system. In some embodiments, an antibody comprises an IgG4 Fc region comprising an A330S substitution, according to the Kabat numbering system. In some embodiments, an antibody comprises an IgG4 Fc region comprising a P331S substitution, according to the Kabat numbering system.

[1026] In some embodiments, an antibody comprises an IgG2 Fc region comprising an A330S substitution, according to the Kabat numbering system. In some embodiments, an antibody comprises an IgG2 Fc region comprising an P331S substitution, according to the Kabat numbering system. In some embodiments, an antibody comprises an IgG2 Fc region comprising an 234A substitution, according to the Kabat numbering system. In some embodiments, an antibody comprises an IgG2 Fc region comprising an 237A substitution, according to the Kabat numbering system.

[1027] In certain embodiments, an anti-TL1A antibody described herein comprises a Fc region comprising a sequence from Table 19. In certain embodiments, an anti-TL1A described herein comprises a Fc region as shown in Table 3.

TABLE 3
Exemplary Fc Mutations

| | Constant Region (SEQ ID NO) | | |
|---|---|---|---|
| Mutations | K_DL | R_EM | K_EM |
| Wild-type IgG1 | 320 | 321 | 322 |
| L235E | 323 | 324 | 325 |
| L234A, L235A | 326 | 327 | 328 |
| L234A, L235A, G237A | 329 | 330 | 331 |
| L234A, L235A, P329G | 332 | 333 | 334 |
| L234F, L235E, P331S | 335 | 336 | 337 |
| L234A, L235E, G237A | 338 | 339 | 340 |
| L234A, L235E, G237A, P331S | 341 | 342 | 343 |
| L234A, L235A, P329A | 344 | 345 | 346 |
| D265A | 347 | 348 | 349 |
| N297G | 350 | 351 | 352 |
| D265A, N297A | 353 | 354 | 355 |
| D265A, N297G | 356 | 357 | 358 |
| L235A, G237A | 359 | 360 | 361 |
| Wild-type IgG4 | 362 | | |

[1028] In certain embodiments, an anti-TL1A antibody described herein comprises a Fc region comprising SEQ ID NO: 320 or a sequence at least about 90%, 91%, 92%, 93%, 94%, 95%, 96%, 97%, 98%, or 99% identical to SEQ ID NO: 320. In certain embodiments, an anti-TL1A antibody described herein comprises a Fc region comprising SEQ ID NO: 321 or a sequence at least about 90%, 91%, 92%, 93%, 94%, 95%, 96%, 97%, 98%, or99% identical to SEQ ID NO: 321. In certain embodiments, an anti-TL1A antibody described herein comprises a Fc region comprising SEQ ID NO: 322 or a sequence at least about 90%, 91%, 92%, 93%, 94%, 95%, 96%, 97%, 98%, or 99% identical to SEQ ID NO: 322. In certain embodiments, an anti-TL1A antibody described herein comprises a Fc region comprising SEQ ID NO: 323 or a sequence at least about 90%, 91%, 92%, 93%, 94%, 95%, 96%, 97%, 98%, or 99% identical to SEQ ID NO: 323. In certain embodiments, an anti-TL1A antibody described herein comprises a Fc region comprising SEQ ID NO: 324 or a sequence at least about 90%, 91%, 92%, 93%, 94%, 95%, 96%, 97%, 98%, or 99% identical to SEQ ID NO: 324. In certain embodiments, an anti-TL1A antibody described herein comprises a Fc region comprising SEQ ID NO: 325 or a sequence at least about 90%, 91%, 92%, 93%, 94%, 95%, 96%, 97%, 98%, or 99% identical to SEQ ID NO: 325. In certain embodiments, an anti-TL1A antibody described herein comprises a Fc region comprising SEQ ID NO: 326 or a sequence at least about 90%, 91%, 92%, 93%, 94%, 95%, 96%, 97%, 98%, or99% identical to SEQ ID NO: 326. In certain embodiments, an anti-TL1A antibody described herein comprises a Fc region comprising SEQ ID NO: 327 or a sequence at least about 90%, 91%, 92%, 93%, 94%, 95%, 96%, 97%, 98%, or 99% identical to SEQ ID NO: 327. In certain embodiments, an anti-TL1A antibody described herein comprises a Fc region comprising SEQ ID NO: 328 or a sequence at least about 90%, 91%, 92%, 93%, 94%, 95%, 96%, 97%, 98%, or 99% identical to SEQ ID NO: 328. In certain embodiments, an anti-TL1A antibody described herein comprises a Fc region comprising SEQ ID NO: 329 or a sequence at least about 90%, 91%, 92%, 93%, 94%, 95%, 96%, 97%, 98%, or 99% identical to SEQ ID NO: 329. In certain embodiments, an anti-TL1A antibody described herein comprises a Fc region comprising SEQ ID NO: 330 or a sequence at least about 90%, 91%, 92%, 93%, 94%, 95%, 96%, 97%, 98%, or 99% identical to SEQ ID NO: 330. In certain embodiments, an anti-TL1A antibody described herein comprises a Fc region comprising SEQ ID NO: 331 or a sequence at least about 90%, 91%, 92%, 93%, 94%, 95%, 96%, 97%, 98%, or99% identical to SEQ ID NO: 331. In certain embodiments, an anti-TL1A antibody described herein comprises a Fc region comprising SEQ ID NO: 332 or a sequence at least about 90%, 91%, 92%, 93%, 94%, 95%, 96%, 97%, 98%, or 99% identical to SEQ ID NO: 332. In certain embodiments, an anti-TL1A antibody described herein comprises a Fc region comprising SEQ ID NO: 333 or a sequence at least about 90%, 91%, 92%, 93%, 94%, 95%, 96%, 97%, 98%, or 99% identical to SEQ ID NO: 333. In certain embodiments, an anti-TL1A antibody described herein comprises a Fc region comprising SEQ ID NO: 334 or a sequence at least about 90%, 91%, 92%, 93%, 94%, 95%, 96%, 97%, 98%, or 99% identical to SEQ ID NO: 334. In certain embodiments, an anti-TL1A antibody described herein comprises a Fc region comprising SEQ ID NO: 335 or a sequence at least about 90%, 91%, 92%, 93%, 94%, 95%, 96%, 97%, 98%, or 99% identical to SEQ ID NO: 335. In certain embodiments, an anti-TL1A antibody described herein comprises a Fc region comprising SEQ ID NO: 336 or a sequence at least about 90%, 91%, 92%, 93%, 94%, 95%, 96%, 97%, 98%, or99% identical to SEQ ID NO: 336. In certain embodiments, an anti-TL1A antibody described herein comprises a Fc region comprising SEQ ID NO: 337 or a sequence at least about 90%, 91%, 92%, 93%, 94%, 95%, 96%, 97%, 98%, or 99% identical to SEQ ID NO: 337. In certain embodiments, an anti-TL1A antibody described herein comprises a Fc region comprising SEQ ID NO: 338 or a sequence at least about 90%, 91%, 92%, 93%, 94%, 95%, 96%, 97%, 98%, or 99% identical to SEQ ID NO: 338. In certain embodiments, an anti-TL1A antibody described herein comprises a Fc region comprising SEQ ID NO: 339 or a sequence at least about 90%, 91%, 92%, 93%, 94%, 95%, 96%, 97%, 98%, or 99% identical to SEQ ID NO: 339. In certain embodiments, an anti-TL1A antibody described herein comprises a Fc region comprising SEQ ID NO: 340 or a sequence at least about 90%, 91%, 92%, 93%, 94%, 95%, 96%, 97%, 98%, or 99% identical to SEQ ID NO: 340. In certain embodiments, an anti-TL1A antibody described herein comprises a Fc region comprising SEQ ID NO: 341 or a sequence at least about 90%, 91%, 92%, 93%, 94%, 95%, 96%, 97%, 98%, or99% identical to SEQ ID NO: 341. In certain embodiments, an anti-TL1A antibody described herein comprises a Fc region comprising SEQ ID NO: 342 or a sequence at least about 90%, 91%, 92%, 93%, 94%, 95%, 96%, 97%, 98%, or 99% identical to SEQ ID NO: 342. In certain embodiments, an anti-TL1A antibody described herein comprises a Fc region comprising SEQ ID NO: 343 or a sequence at least about 90%, 91%, 92%, 93%, 94%, 95%, 96%, 97%, 98%, or 99% identical to SEQ ID NO: 343. In certain embodiments, an anti-TL1A antibody described herein comprises a Fc region comprising SEQ ID NO: 344 or a sequence at least about 90%, 91%, 92%, 93%, 94%, 95%, 96%, 97%, 98%, or 99% identical to SEQ ID NO: 344. In certain embodiments, an anti-TL1A antibody described herein comprises a Fc region comprising SEQ ID NO: 345 or a sequence at least about 90%, 91%, 92%, 93%, 94%, 95%, 96%, 97%, 98%, or 99% identical to SEQ ID NO: 345. In certain embodiments, an anti-TL1A antibody described herein comprises a Fc region comprising SEQ ID NO: 346 or a sequence at least about 90%, 91%, 92%, 93%, 94%, 95%, 96%, 97%, 98%, or99% identical to SEQ ID NO: 346. In certain embodiments, an anti-TL1A antibody described herein comprises a Fc region comprising SEQ ID NO: 347 or a sequence at least about 90%, 91%, 92%, 93%, 94%, 95%, 96%, 97%, 98%, or 99% identical to SEQ ID NO: 347. In certain embodiments, an anti-TL1A antibody described herein comprises a Fc region comprising SEQ ID NO: 348 or a sequence at least about 90%, 91%, 92%, 93%, 94%, 95%, 96%, 97%, 98%, or 99% identical to SEQ ID NO: 348. In certain embodiments, an anti-TL1A antibody described herein comprises a Fc region comprising SEQ ID NO: 349 or a sequence at least about 90%, 91%, 92%, 93%, 94%, 95%, 96%, 97%, 98%, or 99% identical to SEQ ID NO: 349. In certain embodiments, an anti-TL1A antibody described herein comprises a Fc region comprising SEQ ID NO: 350 or a sequence at least about 90%, 91%, 92%, 93%, 94%, 95%, 96%, 97%, 98%, or 99% identical to SEQ ID NO: 350. In certain embodiments, an anti-TL1A antibody described herein comprises a Fc region comprising SEQ ID NO: 351 or a sequence at least about 90%, 91%, 92%, 93%, 94%, 95%, 96%, 97%, 98%, or99% identical to SEQ ID NO: 351. In certain embodiments, an anti-TL1A antibody described herein comprises a Fc region comprising SEQ ID NO: 352 or a sequence at least about 90%, 91%, 92%, 93%, 94%, 95%, 96%, 97%, 98%, or 99% identical to SEQ ID NO: 352. In certain embodiments, an anti-TL1A antibody described herein comprises a Fc region comprising SEQ ID NO: 353 or a sequence at least about 90%, 91%, 92%, 93%, 94%, 95%, 96%, 97%, 98%, or 99% identical to SEQ ID NO: 353. In certain embodiments, an anti-TL1A antibody described herein comprises a Fc region comprising SEQ ID NO: 354 or a sequence at least about 90%, 91%, 92%, 93%, 94%, 95%, 96%, 97%, 98%, or 99% identical to SEQ ID NO: 354. In certain embodiments, an anti-TL1A antibody described herein comprises a Fc region comprising SEQ ID NO: 355 or a sequence at least about 90%, 91%, 92%, 93%, 94%, 95%, 96%, 97%, 98%, or 99% identical to SEQ ID NO: 355. In certain embodiments, an anti-TL1A antibody described herein comprises a Fc region comprising SEQ ID NO: 356 or a sequence at least about 90%, 91%, 92%, 93%, 94%, 95%, 96%, 97%, 98%, or99% identical to SEQ ID NO: 356. In certain embodiments, an anti-TL1A antibody described herein comprises a Fc region comprising SEQ ID NO: 357 or a sequence at least about 90%, 91%, 92%, 93%, 94%, 95%, 96%, 97%, 98%, or 99% identical to SEQ ID NO: 357. In certain embodiments, an anti-TL1A antibody described herein comprises a Fc region comprising SEQ ID NO: 358 or a sequence at least about 90%, 91%, 92%, 93%, 94%, 95%, 96%, 97%, 98%, or 99% identical to SEQ ID NO: 358. In certain embodiments, an anti-TL1A antibody described herein comprises a Fc region comprising SEQ ID NO: 359 or a sequence at least about 90%, 91%, 92%, 93%, 94%, 95%, 96%, 97%, 98%, or 99% identical to SEQ ID NO: 359. In certain embodiments, an anti-TL1A antibody described herein comprises a Fc region comprising SEQ ID NO: 360 or a sequence at least about 90%, 91%, 92%, 93%, 94%, 95%, 96%, 97%, 98%, or 99% identical to SEQ ID NO: 360. In certain embodiments, an anti-TL1A antibody described herein comprises a Fc region comprising SEQ ID NO: 361 or a sequence at least about 90%, 91%, 92%, 93%, 94%, 95%, 96%, 97%, 98%, or99% identical to SEQ ID NO: 361. In certain embodiments, an anti-TL1A antibody described herein comprises a Fc region comprising SEQ ID NO: 362 or a sequence at least about 90%, 91%, 92%, 93%, 94%, 95%, 96%, 97%, 98%, or 99% identical to SEQ ID NO: 362.

[1029] In some embodiments, the antibodies of this disclosure are variants that possess some but not all effector functions, which make it a desirable candidate for applications in which the half-life of the antibody in vivo is important yet certain effector functions (such as complement and ADCC) are unnecessary or deleterious.

[1030] In vitro and/or in vivo cytotoxicity assays can be conducted to confirm the reduction/depletion of CDC and/or ADCC activities. For example, Fc receptor (FcR) binding assays can be conducted to ensure that the antibody lacks FcγR binding (hence likely lacking ADCC activity) but retains FcRn binding ability. Measurement of effector function may be performed as described in Example 3.

[1031] In some embodiments, antibodies are tested for binding to Fcγ receptors and complement C1 q by ELISA. In some embodiments, antibodies are tested for the ability to activate primary human immune cells in vitro, for example, by assessing their ability to induce expression of activation markers.

[1032] In some embodiments, assessment of ADCC activity of an anti-TL1A antibody comprises adding the antibody to target cells in combination with immune effector cells, which may be activated by the antigen antibody complexes resulting in cytolysis of the target cell. Cytolysis may be detected by the release of label (e.g. radioactive substrates, fluorescent dyes or natural intracellular proteins) from the lysed cells. Useful effector cells for such assays include peripheral blood mononuclear cells (PBMC) and Natural Killer (NK) cells. Specific examples of in vitro ADCC assays are described in Wisecarver et al., 1985 79:277-282; Bruggemann et al., 1987, J Exp Med 166:1351-1361; Wilkinson et al., 2001, J Immunol Methods 258:183-191; Patel et al., 1995 J Immunol Methods 184:29-38. Alternatively, or additionally, ADCC activity of the antibody of interest may be assessed in vivo, e.g., in an animal model such as that disclosed in Clynes et al., 1998, PNAS USA 95:652-656.

[1033] In some embodiments, antibodies comprising a Fc region herein exhibit decreased ADCC activities as compared to an unmodified antibody (e.g., an antibody with human IgG1). In some embodiments, the antibodies herein exhibit ADCC activities that are at least 2-fold, or at least 3-fold, or at least 5-fold or at least 10-fold or at least 50-fold or at least 100-fold less than that of an unmodified antibody. In some embodiments, antibodies herein exhibit ADCC activities that are reduced by at least 10%, or at least 20%, or by at least 30%, or by at least 40%, or by at least 50%, or by at least 60%, or by at least 70%, or by at least 80%, or by at least 90%, or by at least 100%, or by at least 200%, or by at least 300%, or by at least 400%, or by at least 500% relative to an unmodified antibody. In certain embodiments, antibodies herein have no detectable ADCC activity. In certain embodiments, the reduction and/or abatement of ADCC activity may be attributed to the reduced affinity antibodies of the invention exhibit for Fc ligands and/or receptors.

[1034] In some embodiments, an assessment of complement activation, a CDC assay, may be performed as described in Gazzano-Santoro et al., 1996, J. Immunol. Methods, 202:163.

[1035] In some embodiments, antibodies comprising Fc regions described herein exhibit decreased affinities to C1q relative to an unmodified antibody (e.g., human IgG1). In some embodiments, antibodies herein exhibit affinities for C1q receptor that are at least 2 fold, or at least 3 fold, or at least 5 fold, or at least 7 fold, or at least 10 fold, or at least 20 fold, or at least 30 fold, or at least 40 fold, or at least 50 fold, or at least 60 fold, or at least 70 fold, or at least 80 fold, or at least 90 fold, or at least 100 fold, or at least 200 fold less than an unmodified antibody. In some embodiments, antibodies herein exhibit affinities for C1q that are at least 90%, at least 80%, at least 70%, at least 60%, at least 50%, at least 40%, at least 30%, at least 20%, at least 10%, or at least 5% less than an unmodified antibody. In some embodiments, antibodies herein exhibit affinities for C1q that are between about 100 nM to about 100 μM, or about 100 nM to about 10 μM, or about 100 nM to about 1 μM, or about 1 nM to about 100 μM, or about 10 nM to about 100 μM, or about 1 μM to about 100 μM, or about 10 μM to about 100 μM. In certain embodiments, antibodies herein exhibit affinities for C1q that are greater than 1 μM, greater than 5 μM, greater than 10 μM, greater than 25 μM, greater than 50 μM, or greater than 100 μM.

[1036] In some embodiments, antibodies comprising Fc regions described herein exhibit decreased CDC activities as compared to an unmodified antibody (e.g., human IgG1). In some embodiments, antibodies herein exhibit CDC activities that are at least 2-fold, or at least 3-fold, or at least 5-fold or at least 10-fold or at least 50-fold or at least 100-fold less than that of an unmodified antibody. In some embodiments, antibodies herein exhibit CDC activities that are reduced by at least 10%, or at least 20%, or by at least 30%, or by at least 40%, or by at least 50%, or by at least 60%, or by at least 70%, or by at least 80%, or by at least 90%, or by at least 100%, or by at least 200%, or by at least 300%, or by at least 400%, or by at least 500% relative to an unmodified antibody. In certain embodiments, antibodies herein exhibit no detectable CDC activities. In some embodiments, the reduction and/or abatement of CDC activity may be attributed to the reduced affinity antibodies of the invention exhibit for Fc ligands and/or receptors.

[1037] Accordingly, further provided and described herein are anti-TL1A antibodies comprising a variant (e.g. harboring mutations) Fc region that reduce the cytotoxic response (e.g. ADCC or CDC) elicited by an anti-TL1A antibody. In some embodiments, an anti-TL1A antibody described herein comprises a Fc region comprising SEQ ID NO: 401 or a sequence at least about 90%, 91%, 92%, 93%, 94%, 95%, 96%, 97%, 98%, or 99% identical to SEQ ID NO: 401. In some embodiments, an anti-TL1A antibody described herein comprises a Fc region comprising SEQ ID NO: 402 or a sequence at least about 90%, 91%, 92%, 93%, 94%, 95%, 96%, 97%, 98%, or 99% identical to SEQ ID NO: 402. In some embodiments, an anti-TL1A antibody described herein comprises a Fc region comprising SEQ ID NO: 403 or a sequence at least about 90%, 91%, 92%, 93%, 94%, 95%, 96%, 97%, 98%, or 99% identical to SEQ ID NO: 403. In some embodiments, an anti-TL1A antibody described herein comprises a Fc region comprising SEQ ID NO: 404 or a sequence at least about 90%, 91%, 92%, 93%, 94%, 95%, 96%, 97%, 98%, or 99% identical to SEQ ID NO: 404. In some embodiments, an anti-TL1A antibody described herein comprises a Fc region comprising SEQ ID NO: 405 or a sequence at least about 90%, 91%, 92%, 93%, 94%, 95%, 96%, 97%, 98%, or 99% identical to SEQ ID NO: 405. In some embodiments, an anti-TL1A antibody described herein comprises a Fc region comprising SEQ ID NO: 406 or a sequence at least about 90%, 91%, 92%, 93%, 94%, 95%, 96%, 97%, 98%, or 99% identical to SEQ ID NO: 406. In some embodiments, an anti-TL1A antibody described herein comprises a Fc region comprising SEQ ID NO: 407 or a sequence at least about 90%, 91%, 92%, 93%, 94%, 95%, 96%, 97%, 98%, or 99% identical to SEQ ID NO: 407. In some embodiments, an anti-TL1A antibody described herein comprises a Fc region comprising SEQ ID NO: 408 or a sequence at least about 90%, 91%, 92%, 93%, 94%, 95%, 96%, 97%, 98%, or99% identical to SEQ ID NO: 408. In some embodiments, an anti-TL1A antibody described herein comprises a Fc region comprising SEQ ID NO: 409 or a sequence at least about 90%, 91%, 92%, 93%, 94%, 95%, 96%, 97%, 98%, or 99% identical to SEQ ID NO: 409. In some embodiments, an anti-TL1A antibody described herein comprises a Fc region comprising SEQ ID NO: 410 or a sequence at least about 90%, 91%, 92%, 93%, 94%, 95%, 96%, 97%, 98%, or 99% identical to SEQ ID NO: 410. In some embodiments, an anti-TL1A antibody described herein comprises a Fc region comprising SEQ ID NO: 411 or a sequence at least about 90%, 91%, 92%, 93%, 94%, 95%, 96%, 97%, 98%, or 99% identical to SEQ ID NO: 411. In some embodiments, an anti-TL1A antibody described herein comprises a Fc region comprising SEQ ID NO: 412 or a sequence at least about 90%, 91%, 92%, 93%, 94%, 95%, 96%, 97%, 98%, or 99% identical to SEQ ID NO: 412. In some embodiments, an anti-TL1A antibody described herein comprises a Fc region comprising SEQ ID NO: 413 or a sequence at least about 90%, 91%, 92%, 93%, 94%, 95%, 96%, 97%, 98%, or 99% identical to SEQ ID NO: 413.

[1038] By way of further example, in certain embodiments, an anti-TL1A antibody described herein comprises a heavy chain comprising SEQ ID NO: 501 or a sequence at least about 90%, 91%, 92%, 93%, 94%, 95%, 96%, 97%, 98%, or 99% identical to SEQ ID NO: 501. In certain embodiments, an anti-TL1A antibody described herein comprises a heavy chain comprising SEQ ID NO: 502 or a sequence at least about 90%, 91%, 92%, 93%, 94%, 95%, 96%, 97%, 98%, or 99% identical to SEQ ID NO: 502. In certain embodiments, an anti-TL1A antibody described herein comprises a heavy chain comprising SEQ ID NO: 503 or a sequence at least about 90%, 91%, 92%, 93%, 94%, 95%, 96%, 97%, 98%, or99% identical to SEQ ID NO: 503. In certain embodiments, an anti-TL1A antibody described herein comprises a heavy chain comprising SEQ ID NO: 504 or a sequence at least about 90%, 91%, 92%, 93%, 94%, 95%, 96%, 97%, 98%, or 99% identical to SEQ ID NO: 504. In certain embodiments, an anti-TL1A antibody described herein comprises a heavy chain comprising SEQ ID NO: 505 or a sequence at least about 90%, 91%, 92%, 93%, 94%, 95%, 96%, 97%, 98%, or 99% identical to SEQ ID NO: 505. In certain embodiments, an anti-TL1A antibody described herein comprises a heavy chain comprising SEQ ID NO: 506 or a sequence at least about 90%, 91%, 92%, 93%, 94%, 95%, 96%, 97%, 98%, or 99% identical to SEQ ID NO: 506. In certain embodiments, an anti-TL1A antibody described herein comprises a heavy chain comprising SEQ ID NO: 507 or a sequence at least about 90%, 91%, 92%, 93%, 94%, 95%, 96%, 97%, 98%, or 99% identical to SEQ ID NO: 507. In certain embodiments, an anti-TL1A antibody described herein comprises a heavy chain comprising SEQ ID NO: 508 or a sequence at least about 90%, 91%, 92%, 93%, 94%, 95%, 96%, 97%, 98%, or99% identical to SEQ ID NO: 508. In certain embodiments, an anti-TL1A antibody described herein comprises a heavy chain comprising SEQ ID NO: 509 or a sequence at least about 90%, 91%, 92%, 93%, 94%, 95%, 96%, 97%, 98%, or 99% identical to SEQ ID NO: 509. In certain embodiments, an anti-TL1A antibody described herein comprises a heavy chain comprising SEQ ID NO: 510 or a sequence at least about 90%, 91%, 92%, 93%, 94%, 95%, 96%, 97%, 98%, or 99% identical to SEQ ID NO: 510. In certain embodiments, an anti-TL1A antibody described herein comprises a heavy chain comprising SEQ ID NO: 511 or a sequence at least about 90%, 91%, 92%, 93%, 94%, 95%, 96%, 97%, 98%, or 99% identical to SEQ ID NO: 511. In certain embodiments, an anti-TL1A antibody described herein comprises a heavy chain comprising SEQ ID NO: 512 or a sequence at least about 90%, 91%, 92%, 93%, 94%, 95%, 96%, 97%, 98%, or 99% identical to SEQ ID NO: 512. In certain embodiments, an anti-TL1A antibody described herein comprises a heavy chain comprising SEQ ID NO: 513 or a sequence at least about 90%, 91%, 92%, 93%, 94%, 95%, 96%, 97%, 98%, or99% identical to SEQ ID NO: 513. In certain embodiments, the heavy chain is paired with a light chain comprising SEQ ID NO: 514 or a sequence at least about 90%, 91%, 92%, 93%, 94%, 95%, 96%, 97%, 98%, or 99% identical to SEQ ID NO: 514. In certain embodiments, the heavy chain is paired with the light chain variable region of SEQ ID NO: 514 or a sequence at least about 90%, 91%, 92%, 93%, 94%, 95%, 96%, 97%, 98%, or 99% identical to the light chain variable region of SEQ ID NO: 514. In certain embodiments, the heavy chain is paired with the light chain variable region of SEQ ID NO: 514 or a sequence at least about 90%, 91%, 92%, 93%, 94%, 95%, 96%, 97%, 98%, or 99% identical to the light chain variable region of SEQ ID NO: 515.

[1039] In some embodiments, anti-TL1A described herein comprise a light chain constant region comprising SEQ ID NO: 319 or a sequence at least about 90%, 91%, 92%, 93%, 94%, 95%, 96%, 97%, 98%, or 99% identical to SEQ ID NO: 319.

### Further Non-Limiting Exemplary Anti-TL1A Antibodies

[1040] In one aspect, provided herein is a first embodiment of an anti-TL1A antibody comprising a heavy chain comprising a HCDR1, a HCDR2, and a HCDR3, and a light chain comprising a LCDR1, a LCDR2, and a LCDR3. Non-limiting additional embodiments include: (Embodiment 2) The anti-TL1A antibody of embodiment 1, comprising a HCDR1 comprising SEQ ID NO: 1. (Embodiment 3) The anti-TL1A antibody of embodiment 1 or embodiment 2, comprising a HCDR2 comprising SEQ ID NO: 2. (Embodiment 4) The anti-TL1A antibody of embodiment 1 or embodiment 2, comprising a HCDR2 comprising SEQ ID NO: 3. (Embodiment 5) The anti-TL1A antibody of embodiment 1 or embodiment 2, comprising a HCDR2 comprising SEQ ID NO: 4. (Embodiment 6) The anti-TL1A antibody of embodiment 1 or embodiment 2, comprising a HCDR2 comprising SEQ ID NO: 5. (Embodiment 7) The anti-TL1A antibody of any one of embodiments 1-6, comprising a HCDR3 comprising SEQ ID NO: 6. (Embodiment 8) The anti-TL1A antibody of any one of embodiments 1-6, comprising a HCDR3 comprising SEQ ID NO: 7. (Embodiment 9) The anti-TL1A antibody of any one of embodiments 1-6, comprising a HCDR3 comprising SEQ ID NO: 8. (Embodiment 10) The anti-TL1A antibody of any one of embodiments 1-6, comprising a HCDR3 comprising SEQ ID NO: 9. (Embodiment 11) The anti-TL1A antibody of any one of embodiments 1-10, comprising a LCDR1 comprising SEQ ID NO: 10. (Embodiment 12) The anti-TL1A antibody of any one of embodiments 1-11, comprising a LCDR2 comprising SEQ ID NO: 11. (Embodiment 13) The anti-TL1A antibody of any one of embodiments 1-12, comprising a LCDR3 comprising SEQ ID NO: 12. (Embodiment 14) The anti-TL1A antibody of any one of embodiments 1-12, comprising a LCDR3 comprising SEQ ID NO: 13. (Embodiment 15) The anti-TL1A antibody of any one of embodiments 1-12, comprising a LCDR3 comprising SEQ ID NO: 14 or 15.

[1041] (Embodiment 16) The anti-TL1A antibody of any one of embodiments 1-15, comprising a heavy chain framework comprising IGHV1-46*02. (Embodiment 17) The anti-TL1 A antibody of any one of embodiments 1-15, comprising a heavy chain framework comprising a variant of IGHV1-46*02 comprising between about 1 and about 20 amino acid substitutions from SEQ ID NO: 316. (Embodiment 18) The anti-TL1A antibody of any one of embodiments 1-15, comprising a heavy chain framework comprising a variant of IGHV1-46*02 comprising between about 1 and about 9 amino acid substitutions from SEQ ID NO: 316. (Embodiment 19) The anti-TL1A antibody of any one of embodiments 1-15, comprising a heavy chain framework comprising a variant of IGHV1-46*02 comprising about 1, 2, 3, 4, 5, 6, 7, 8, 9, 10, 11, 12, 13, 14, 15, 16, 17, 18, 19, or 20 amino acid substitutions from SEQ ID NO: 316 in the framework. (Embodiment 20) The anti-TL1A antibody of any one of embodiments 17-19, wherein the heavy chain framework substitution comprises Q1E, as determined by Aho or Kabat numbering. (Embodiment 21) The anti-TL1A antibody of any one of embodiments 17-20, wherein the heavy chain framework substitution comprises R45K, as determined by Aho or Kabat numbering. (Embodiment 22) The anti-TL1A antibody of any one of embodiments 17-21, wherein the heavy chain framework substitution comprises A47R, as determined by Aho or Kabat numbering. (Embodiment 23) The anti-TL1A antibody of any one of embodiments 17-22, wherein the heavy chain framework substitution comprises M55I, as determined by Aho or Kabat numbering. (Embodiment 24) The anti-TL1A antibody of any one of embodiments 17-23, wherein the heavy chain framework substitution comprises V78A, as determined by Aho or Kabat numbering. (Embodiment 25) The anti-TL1A antibody of any one of embodiments 17-24, wherein the heavy chain framework substitution comprises M80I, as determined by Aho or Kabat numbering. (Embodiment 26) The anti-TL1A antibody of any one of embodiments 17-25, wherein the heavy chain framework substitution comprises R82T, as determined by Aho or Kabat numbering. (Embodiment 27) The anti-TL1A antibody of any one of embodiments 17-26, wherein the heavy chain framework substitution comprises V89A, as determined by Aho or Kabat numbering. (Embodiment 28) The anti-TL1A antibody of any one of embodiments 17-27, wherein the heavy chain framework substitution comprises M91L, as determined by Aho or Kabat numbering.

[1042] (Embodiment 29) The anti-TL1A antibody of any one of embodiments 1-15, comprising a heavy chain framework comprising SEQ ID NO: 301. (Embodiment 30) The anti-TL1A antibody of embodiment 29, wherein X1 is Q. (Embodiment 3l) The anti-TL1A of embodiment 29, wherein X1=E. (Embodiment 32) The anti-TL1A of any one of embodiments 29-31, wherein X2=R. (Embodiment 33) The anti-TL1A of any one of embodiments 29-31, wherein X2=K. (Embodiment 34) The anti-TL1A of any one of embodiments 29-33, wherein X3=A. (Embodiment 35) The anti-TL1A of any one of embodiments 29-33, wherein X3=R. (Embodiment 36) The anti-TL1A of any one of embodiments 29-35, wherein X4=M. (Embodiment 37) The anti-TL1A of any one of embodiments 29-35, wherein X4=I. (Embodiment 38) The anti-TL1A of any one of embodiments 29-37, wherein X5=V. (Embodiment 39) The anti-TL1A of any one of embodiments 29-37, wherein X5=A. (Embodiment 40) The anti-TL1A of any one of embodiments 29-39, wherein X6=M. (Embodiment 41) The anti-TL1A of any one of embodiments 29-39, wherein X6=I. (Embodiment 42) The anti-TL1A of any one of embodiments 29-41, wherein X7=R. (Embodiment 43) The anti-TL1A of any one of embodiments 29-41, wherein X7=T. (Embodiment 44) The anti-TL1A of any one of embodiments 29-43, wherein X8=V. (Embodiment 45) The anti-TL1A of any one of embodiments 29-43, wherein X8=A. (Embodiment 46) The anti-TL1A of any one of embodiments 29-45, wherein X9=M. (Embodiment 47) The anti-TL1A of any one of embodiments 29-45, wherein X9=L.

[1043] (Embodiment 48) The anti-TL1A antibody of any one of embodiments 1-15, comprising a heavy chain framework comprising SEQ ID NO: 302. (Embodiment 49) The anti-TL1A antibody of embodiment 48, wherein X1 is Q. (Embodiment 50) The anti-TL1A of embodiment 48, wherein X1=E. (Embodiment 51) The anti-TL1A of any one of embodiments 48-50, wherein X2=R. (Embodiment 52) The anti-TL1A of any one of embodiments 48-50, wherein X2=K. (Embodiment 53) The anti-TL1A of any one of embodiments 48-52, wherein X3=A. (Embodiment 54) The anti-TL1A of any one of embodiments 48-52, wherein X3=R. (Embodiment 55) The anti-TL1A of any one of embodiments 48-54, wherein X4=M. (Embodiment 56) The anti-TL1A of any one of embodiments 48-54, wherein X4=I. (Embodiment 57) The anti-TL1A of any one of embodiments 48-56, wherein X5=V. (Embodiment 58) The anti-TL1A of any one of embodiments 48-56, wherein X5=A. (Embodiment 59) The anti-TL1A of any one of embodiments 48-58, wherein X6=M. (Embodiment 60) The anti-TL1A of any one of embodiments 48-58, wherein X6=I. (Embodiment 61) The anti-TL1A of any one of embodiments 48-60, wherein X7=R. (Embodiment 62) The anti-TL1A of any one of embodiments 48-60, wherein X7=T. (Embodiment 63) The anti-TL1A of any one of embodiments 48-62, wherein X8=V. (Embodiment 64) The anti-TL1A of any one of embodiments 48-62, wherein X8=A. (Embodiment 65) The anti-TL1A of any one of embodiments 48-64, wherein X9=M. (Embodiment 66) The anti-TL1A of any one of embodiments 48-64, wherein X9=L.

[1044] (Embodiment 67) The anti-TL1A antibody of any one of embodiments 1-66, comprising a light chain framework comprising IGKV3-20*01. (Embodiment 68) The anti-TL1A antibody of any one of embodiments 1-66, comprising a light chain framework comprising a variant of IGKV3-20*01 comprising between about 1 and about 20 amino acid substitutions from SEQ ID NO: 317. (Embodiment 69) The anti-TL1A antibody of any one of embodiments 1-66, comprising a light chain framework comprising a variant of IGKV3-20*01 comprising about 1 amino acid substitution from SEQ ID NO: 317. (Embodiment 70) The anti-TL1A antibody of any one of embodiments 1-66, comprising a light chain framework comprising a variant of IGKV3-20*01 comprising about 2 amino acid substitutions from SEQ ID NO: 317. (Embodiment 71) The anti-TL1A antibody of any one of embodiments 1-66, comprising a light chain framework comprising a variant of IGKV3-20*01 comprising about 1, 2, 3, 4, 5, 6, 7, 8, 9, 10, 11, 12, 13, 14, 15, 16, 17, 18, 19, or20 amino acid substitutions from SEQ ID NO: 317 in the framework. (Embodiment 72) The anti-TL1A antibody of any one of embodiments 69-71, wherein the light chain framework substitution comprises Q1E, as determined by Aho or Kabat numbering. (Embodiment 73) The anti-TL1A antibody of any one of embodiments 69-72, wherein the light chain framework substitution comprises R45K, as determined by Aho or Kabat numbering.

[1045] (Embodiment 74) The anti-TL1A antibody of any one of embodiments 1-66, comprising a light chain comprising a light chain framework comprising SEQ ID NO: 303. (Embodiment 75) The anti-TL1A antibody of embodiment 74, wherein X10 is L. (Embodiment 76) The anti-TL1A antibody of embodiment 74, wherein X10 is P. (Embodiment 77) The anti-TL1A antibody of any one of embodiments 74-76, wherein X11 is L. (Embodiment 78) The anti-TL1A antibody of any one of embodiments 74-76, wherein X11 is W.

[1046] (Embodiment 79) The anti-TL1A of any one of embodiments 1-78, comprising a human IgG1 Fc region comprising (a) 297A, 297Q, 297G, or 297D, (b) 279F, 279K, or 279L, (c) 228P, (d) 235A, 235E, 235G, 235Q, 235R, or 235S, (e) 237A, 237E, 237K, 237N, or 237R, (f) 234A, 234V, or 234F, (g) 233P, (h) 328A, (i) 327Q or 327T, (j) 329A, 329G, 329Y, or 329R (k) 331S, (1) 236F or 236R, (m) 238A, 238E, 238G, 238H, 238I, 238V, 238 W, or 238Y, (n) 248A, (o) 254D, 254E, 254G, 254H, 254I, 254N, 254P, 254Q, 254T, or 254V, (p) 255N, (q) 256H, 256K, 256R, or 256V, (r) 264S, (s) 265H, 265K, 265S, 265Y, or 265A, (t) 267G, 267H, 267I, or 267K, (u) 268K, (v) 269N or 269Q, (w) 270A, 270G, 270M, or 270N, (x) 271T, (y) 272N, (z) 292E, 292F, 292G, or 292I, (aa) 293S, (bb) 301 W, (cc) 304E, (dd) 311E, 311G, or 311S, (ee) 316F, (ff) 328V, (gg) 330R, (hh) 339E or 339L, (ii) 343I or 343V, (jj) 373A, 373G, or 373S, (kk) 376E, 376 W, or 376Y, (11) 380D, (mm) 382D or 382P, (nn) 385P, (oo) 424H, 424M, or 424V, (pp) 434I, (qq) 438G, (rr) 439E, 439H, or 439Q, (ss) 440A, 440D, 440E, 440F, 440M, 440T, or 440V, (tt) E233P, (uu) L235E, (vv) L234A and L235A, (ww) L234A, L235A, and G237A, (xx) L234A, L235A, and P329G, (yy) L234F, L235E, and P331 S, (zz) L234A, L235E, and G237A, (aaa), L234A, L235E, G237A, and P331 S (bbb) L234A, L235A, G237A, P238S, H268A, A330S, and P331 S (IgG16), (ccc) L234A, L235A, and P329A, (ddd) G236R and L328R, (eee) G237A, (fff) F241A, (ggg) V264A, (hhh) D265A, (iii) D265A and N297A, (jjj) D265A and N297G, (kkk) D270A, (111) A330L, (mmm) P331A or P331S, or (nnn) any combination of (a)-(uu), per Kabat numbering. (Embodiment 80) The anti-TL1A of any one of embodiments 1-78, comprising a (i) human IgG4 Fc region or (ii) a human IgG4 Fc region comprising (a) S228P and L235E, or (b) S228P, F234A, and L235A, per Kabat numbering. (Embodiment 81) The anti-TL1A of any one of embodiments 1-78, comprising a human IgG2 Fc region; IgG2-IgG4 cross-subclass Fc region; IgG2-IgG3 cross-subclass Fc region; IgG2 comprising H268Q, V309L, A330 S, P331S (IgG2m4); or IgG2 comprising V234A, G237A, P238S, H268A, V309L, A330S, P331S (IgG2 □□□□(Embodiment 82) The anti-TL1A of any one of embodiments 1-81, comprising a heavy chain Fc region comprising any one of SEQ ID NOS: 320-362. (Embodiment 83) The anti-TL1A antibody of any one of embodiments 1-82, comprising a light chain constant region comprising SEQ ID NO: 319.

[1047] (Embodiment 84) The anti-TL1A antibody of any one of embodiments 1-83, comprising at least about 80% monomeric fraction as determined by the size exclusion chromatography method described herein. (Embodiment 85) The anti-TL1A antibody of any one of embodiments 1-84, comprising at least about 81%, at least about 82%, at least about 83%, or at least about 84% monomeric fraction as determined by the size exclusion chromatography method described herein. (Embodiment 86) The anti-TL1A antibody of any one of embodiments 1-85, comprising at least about 85% monomeric fraction as determined by the size exclusion chromatography method described herein. (Embodiment 87) The anti-TL1A antibody of any one of embodiments 1-86, comprising at least about 86%, at least about 87%, at least about 88%, or at least about 89% monomeric fraction as determined by the size exclusion chromatography method described herein. (Embodiment 88) The anti-TL1A antibody of any one of embodiments 1-87, comprising at least about 90% monomeric fraction as determined by the size exclusion chromatography method described herein. (Embodiment 89) The anti-TL1A antibody of any one of embodiments 1-88, comprising at least about 91%, at least about 92%, at least about 93%, or at least about 94% monomeric fraction as determined by the size exclusion chromatography method described herein. (Embodiment 90) The anti-TL1A antibody of any one of embodiments 1-89, comprising at least about 95% monomeric fraction as determined by the size exclusion chromatography method described herein. (Embodiment 91) The anti-TL1A antibody of any one of embodiments 1-90, comprising at least about 96%, at least about 97%, at least about 98%, or at least about 99% monomeric fraction as determined by the size exclusion chromatography method described herein.

[1048] (Embodiment 92) The anti-TL1A antibody of any one of embodiments 1-91, comprising at least about 2 μg/mL expression as determined by the method disclosed herein. (Embodiment 93) The anti-TL1A antibody of any one of embodiments 1-92, comprising between about 2 μg/mL and about 60 μg/mL expression as determined by the method disclosed herein. (Embodiment 94) The anti-TL1A antibody of any one of embodiments 1-93, comprising between about 5 μg/mL and about 60 μg/mL expression as determined by the method disclosed herein. (Embodiment 95) The anti-TL1A antibody of any one of embodiments 1-94, comprising between about 10 μg/mL and about 60 μg/mL expression as determined by the method disclosed herein. (Embodiment 96) The anti-TL1A antibody of any one of embodiments 1-95, comprising at least about 5 μg/mL expression as determined by the method disclosed herein. (Embodiment 97) The anti-TL1A antibody of any one of embodiments 1-96, comprising at least about 10 μg/mL expression as determined by the method disclosed herein. (Embodiment 98) The anti-TL1A antibody of any one of embodiments 1-97, comprising at least about 15 μg/mL expression as determined by the method disclosed herein. (Embodiment 99) The anti-TL1A antibody of any one of embodiments 1-98, comprising at least about 20 μg/mL expression as determined by the method disclosed herein. (Embodiment 100) The anti-TL1A antibody of any one of embodiments 1-91, comprising between about 2 μg/mL and about 50 μg/mL, between about 2 μg/mL and about 40 μg/mL, between about 2 μg/mL and about 30 μg/mL expression, between about 2 μg/mL and about 20 μg/mL, between about 5 μg/mL and about 50 μg/mL, between about 5 μg/mL and about 40 μg/mL, between about 5 μg/mL and about 30 μg/mL, between about 10 μg/mL and about 50 μg/mL, between about 10 μg/mL and about 40 μg/mL, or between about 10 μg/mL and about 30 μg/mL as determined by the method disclosed herein. (Embodiment 101) The anti-TL1A antibody of any one of embodiments 1-91, comprising about 2, 3, 4, 5, 6, 7, 8, 9, 10, 11, 12, 13, 14, 15, 16, 17, 18, 19, 20, 21, 22, 23, 24, 25, 26, 27, 28, 29, 30 μg/mL expression as determined by the method disclosed herein.

[1049] In some embodiments, an anti-TL1A antibody comprises antibody A. As used herein, antibody A comprises the CDRs of antibody A in Table 20. In some cases, antibody A comprises a heavy chain framework comprising SEQ ID NO: 301 (Embodiment X1VQLVQSGAEVKKPGASVKVSCKAS[HCDR1]WVX2QX3PGQGLEWX4G[HCDR2]RX5TX6TX7DTSTSTX8YX9ELSSLRSEDTAVYYCAR[HCDR3]WGQGTTVTVSS), wherein X1=Q or E, X2=R or K, X3=A or R, X4=M or I, X5=V or A, X6=M or I, X7=R or T, X8=V or A, and X9=M or L. In some cases, antibody A comprises a light chain framework comprising SEQ ID NO: 303 (Embodiment EIVLTQSPGTLSLSPGERATLSC[LCDR1]WYQQKPGQAPRX10X11IY[LCDR2]GIPDR FSGSGSGTDFTLTISRLEPEDFAVYYC[LCDR3]FGGGTKLEIK), wherein X10=L or P and X11=L or W. In some cases, antibody A comprises a heavy chain variable region comprising human IGHV1-46*02 framework or a modified human IGHV1-46*02 framework, wherein the modified human IGHV1-46*02 framework has less than or equal to about 1, 2, 3, 4, 5, 6, 7, 8, 9, 10, 11, 12, 13, 14, 15, 16, 17, 18, 19, or 20 amino acid substitutions in the framework. In some cases, antibody A comprises a light chain variable region comprising human IGKV3-20 framework or a modified human IGKV3-20 framework, wherein the modified human IGKV3-20 framework has less than or equal to about 1, 2, 3, 4, 5, 6, 7, 8, 9, 10, 11, 12, 13, 14, 15, 16, 17, 18, 19, or 20 amino acid substitutions in the framework. In some cases, antibody A comprises a constant region comprising reduced ADCC and/or CDC as compared to IgG1. For instance, antibody A comprises a human IgG1 Fc region comprising (a) 297A, 297Q, 297G, or 297D, (b) 279F, 279K, or 279L, (c) 228P, (d) 235A, 235E, 235G, 235Q, 235R, or 235S, (e) 237A, 237E, 237K, 237N, or 237R, (f) 234A, 234V, or 234F, (g) 233P, (h) 328A, (i) 327Q or 327T, (j) 329A, 329G, 329Y, or 329R (k) 331S, (1) 236F or 236R, (m) 238A, 238E, 238G, 238H, 238I, 238V, 238 W, or 238Y, (n) 248A, (o) 254D, 254E, 254G, 254H, 254I, 254N, 254P, 254Q, 254T, or 254V, (p) 255N, (q) 256H, 256K, 256R, or 256V, (r) 264S, (s) 265H, 265K, 265S, 265Y, or 265A, (t) 267G, 267H, 267I, or 267K, (u) 268K, (v) 269N or 269Q, (w) 270A, 270G, 270M, or 270N, (x) 271T, (y) 272N, (z) 292E, 292F, 292G, or 292I, (aa) 293S, (bb) 301 W, (cc) 304E, (dd) 311E, 311G, or 311S, (ee) 316F, (ff) 328V, (gg) 330R, (hh) 339E or 339L, (ii) 343I or 343V, (jj) 373A, 373G, or 373S, (kk) 376E, 376 W, or376Y, (11) 380D, (mm) 382D or 382P, (nn) 385P, (oo) 424H, 424M, or 424V, (pp) 434I, (qq) 438G, (rr) 439E, 439H, or 439Q, (ss) 440A, 440D, 440E, 440F, 440M, 440T, or 440V, (tt) E233P, (uu) L235E, (vv) L234A and L235A, (ww) L234A, L235A, and G237A, (xx) L234A, L235A, and P329G, (yy) L234F, L235E, and P331 S, (zz) L234A, L235E, and G237A, (aaa), L234A, L235E, G237A, and P331S (bbb) L234A, L235A, G237A, P238S, H268A, A330S, and P331S (IgG1σ), (ccc) L234A, L235A, and P329A, (ddd) G236R and L328R, (eee) G237A, (fff) F241A, (ggg) V264A, (hhh) D265A, (iii) D265A and N297A, (jjj) D265A and N297G, (kkk) D270A, (111) A330L, (mmm) P331A or P331S, or (nnn) any combination of (a)-(uu), per Kabat numbering. In some cases, antibody A comprises a constant region comprising at least about 85%, 87%, 88%, 89%, 90%, 91%, 92%, 93%, 94%, 95%, 96%, 97%, 98%, 99%, or 100% identity to SEQ ID NO: 320. In some cases, antibody A comprises a constant region comprising at least about 85%, 87%, 88%, 89%, 90%, 91%, 92%, 93%, 94%, 95%, 96%, 97%, 98%, 99%, or 100% identity to SEQ ID NO: 321. In some cases, antibody A comprises a constant region comprising at least about 85%, 87%, 88%, 89%, 90%, 91%, 92%, 93%, 94%, 95%, 96%, 97%, 98%, 99%, or 100% identity to SEQ ID NO: 322. In some cases, antibody A comprises a constant region comprising at least about 85%, 87%, 88%, 89%, 90%, 91%, 92%, 93%, 94%, 95%, 96%, 97%, 98%, 99%, or 100% identity to SEQ ID NO: 323. In some cases, antibody A comprises a constant region comprising at least about 85%, 87%, 88%, 89%, 90%, 91%, 92%, 93%, 94%, 95%, 96%, 97%, 98%, 99%, or 100% identity to SEQ ID NO: 324. In some cases, antibody A comprises a constant region comprising at least about 85%, 87%, 88%, 89%, 90%, 91%, 92%, 93%, 94%, 95%, 96%, 97%, 98%, 99%, or 100% identity to SEQ ID NO: 325. In some cases, antibody A comprises a constant region comprising at least about 85%, 87%, 88%, 89%, 90%, 91%, 92%, 93%, 94%, 95%, 96%, 97%, 98% 99% or 100% identity to SEQ ID NO: 326. In some cases, antibody A comprises a constant region comprising at least about 85%, 87%, 88%, 89%, 90%, 91%, 92%, 93%, 94%, 95%, 96%, 97%, 98%, 99%, or 100% identity to SEQ ID NO: 327. In some cases, antibody A comprises a constant region comprising at least about 85%, 87%, 88%, 89%, 90%, 91%, 92%, 93%, 94%, 95%, 96%, 97%, 98%, 99%, or 100% identity to SEQ ID NO: 328. In some cases, antibody A comprises a constant region comprising at least about 85%, 87%, 88%, 89%, 90%, 91%, 92%, 93%, 94%, 95%, 96%, 97%, 98%, 99%, or 100% identity to SEQ ID NO: 329. In some cases, antibody A comprises a constant region comprising at least about 85%, 87%, 88%, 89%, 90%, 91%, 92%, 93%, 94%, 95%, 96%, 97%, 98%, 99%, or 100% identity to SEQ ID NO: 330. In some cases, antibody A comprises a constant region comprising at least about 85%, 87%, 88%, 89%, 90%, 91%, 92%, 93%, 94%, 95%, 96%, 97%, 98% 99% or 100% identity to SEQ ID NO: 331. In some cases, antibody A comprises a constant region comprising at least about 85%, 87%, 88%, 89%, 90%, 91%, 92%, 93%, 94%, 95%, 96%, 97%, 98%, 99%, or 100% identity to SEQ ID NO: 332. In some cases, antibody A comprises a constant region comprising at least about 85%, 87%, 88%, 89%, 90%, 91%, 92%, 93%, 94%, 95%, 96%, 97%, 98%, 99%, or 100% identity to SEQ ID NO: 333. In some cases, antibody A comprises a constant region comprising at least about 85%, 87%, 88%, 89%, 90%, 91%, 92%, 93%, 94%, 95%, 96%, 97%, 98%, 99%, or 100% identity to SEQ ID NO: 334. In some cases, antibody A comprises a constant region comprising at least about 85%, 87%, 88%, 89%, 90%, 91%, 92%, 93%, 94%, 95%, 96%, 97%, 98%, 99%, or 100% identity to SEQ ID NO: 335. In some cases, antibody A comprises a constant region comprising at least about 85%, 87%, 88%, 89%, 90%, 91%, 92%, 93%, 94%, 95%, 96%, 97%, 98% 99% or 100% identity to SEQ ID NO: 336. In some cases, antibody A comprises a constant region comprising at least about 85%, 87%, 88%, 89%, 90%, 91%, 92%, 93%, 94%, 95%, 96%, 97%, 98%, 99%, or 100% identity to SEQ ID NO: 337. In some cases, antibody A comprises a constant region comprising at least about 85%, 87%, 88%, 89%, 90%, 91%, 92%, 93%, 94%, 95%, 96%, 97%, 98%, 99%, or 100% identity to SEQ ID NO: 338. In some cases, antibody A comprises a constant region comprising at least about 85%, 87%, 88%, 89%, 90%, 91%, 92%, 93%, 94%, 95%, 96%, 97%, 98%, 99%, or 100% identity to SEQ ID NO: 339. In some cases, antibody A comprises a constant region comprising at least about 85%, 87%, 88%, 89%, 90%, 91%, 92%, 93%, 94%, 95%, 96%, 97%, 98%, 99%, or 100% identity to SEQ ID NO: 340. In some cases, antibody A comprises a constant region comprising at least about 85%, 87%, 88%, 89%, 90%, 91%, 92%, 93%, 94%, 95%, 96%, 97%, 98% 99% or 100% identity to SEQ ID NO: 341. In some cases, antibody A comprises a constant region comprising at least about 85%, 87%, 88%, 89%, 90%, 92%, 93%, 94%, 95%, 91%, 96%, 97%, 98%, 99%, or 100% identity to SEQ ID NO: 342. In some cases, antibody A comprises a constant region comprising at least about 85%, 87%, 88%, 89%, 90%, 91%, 92%, 93%, 94%, 95%, 96%, 97%, 98%, 99%, or 100% identity to SEQ ID NO: 343. In some cases, antibody A comprises a constant region comprising at least about 85%, 87%, 88%, 89%, 90%, 91%, 92%, 93%, 94%, 95%, 96%, 97%, 98%, 99%, or 100% identity to SEQ ID NO: 344. In some cases, antibody A comprises a constant region comprising at least about 85%, 87%, 88%, 89%, 90%, 91%, 92%, 93%, 94%, 95%, 96%, 97%, 98%, 99%, or 100% identity to SEQ ID NO: 345. In some cases, antibody A comprises a constant region comprising at least about 85%, 87%, 88%, 89%, 90%, 91%, 92%, 93%, 94%, 95%, 96%, 97%, 98% 99% or 100% identity to SEQ ID NO: 346. In some cases, antibody A comprises a constant region comprising at least about 85%, 87%, 88%, 89%, 90%, 91%, 92%, 93%, 94%, 95%, 96%, 97%, 98%, 99%, or 100% identity to SEQ ID NO: 347. In some cases, antibody A comprises a constant region comprising at least about 85%, 87%, 88%, 89%, 90%, 91%, 92%, 93%, 94%, 95%, 96%, 97%, 98%, 99%, or 100% identity to SEQ ID NO: 348. In some cases, antibody A comprises a constant region comprising at least about 85%, 87%, 88%, 89%, 90%, 91%, 92%, 93%, 94%, 95%, 96%, 97%, 98%, 99%, or 100% identity to SEQ ID NO: 349. In some cases, antibody A comprises a constant region comprising at least about 85%, 87%, 88%, 89%, 90%, 91%, 92%, 93%, 94%, 95%, 96%, 97%, 98%, 99%, or 100% identity to SEQ ID NO: 350. In some cases, antibody A comprises a constant region comprising at least about 85%, 87%, 88%, 89%, 90%, 91%, 92%, 93%, 94%, 95%, 96%, 97%, 98% 99% or 100% identity to SEQ ID NO: 351. In some cases, antibody A comprises a constant region comprising at least about 85%, 87%, 88%, 89%, 90%, 91%, 92%, 93%, 94%, 95%, 96%, 97%, 98%, 99%, or 100% identity to SEQ ID NO: 352. In some cases, antibody A comprises a constant region comprising at least about 85%, 87%, 88%, 89%, 90%, 91%, 92%, 93%, 94%, 95%, 96%, 97%, 98%, 99%, or 100% identity to SEQ ID NO: 353. In some cases, antibody A comprises a constant region comprising at least about 85%, 87%, 88%, 89%, 90%, 91%, 92%, 93%, 94%, 95%, 96%, 97%, 98%, 99%, or 100% identity to SEQ ID NO: 354. In some cases, antibody A comprises a constant region comprising at least about 85%, 87%, 88%, 89%, 90%, 91%, 92%, 93%, 94%, 95%, 96%, 97%, 98%, 99%, or 100% identity to SEQ ID NO: 355. In some cases, antibody A comprises a constant region comprising at least about 85%, 87%, 88%, 89%, 90%, 91%, 92%, 93%, 94%, 95%, 96%, 97%, 98% 99% or 100% identity to SEQ ID NO: 356. In some cases, antibody A comprises a constant region comprising at least about 85%, 87%, 88%, 89%, 90%, 91%, 92%, 93%, 94%, 95%, 96%, 97%, 98%, 99%, or 100% identity to SEQ ID NO: 357. In some cases, antibody A comprises a constant region comprising at least about 85%, 87%, 88%, 89%, 90%, 91%, 92%, 93%, 94%, 95%, 96%, 97%, 98%, 99%, or 100% identity to SEQ ID NO: 358. In some cases, antibody A comprises a constant region comprising at least about 85%, 87%, 88%, 89%, 90%, 91%, 92%, 93%, 94%, 95%, 96%, 97%, 98%, 99%, or 100% identity to SEQ ID NO: 359. In some cases, antibody A comprises a constant region comprising at least about 85%, 87%, 88%, 89%, 90%, 91%, 92%, 93%, 94%, 95%, 96%, 97%, 98%, 99%, or 100% identity to SEQ ID NO: 360. In some cases, antibody A comprises a constant region comprising at least about 85%, 87%, 88%, 89%, 90%, 91%, 92%, 93%, 94%, 95%, 96%, 97%, 98% 99% or 100% identity to SEQ ID NO: 361. In some cases, antibody A comprises a constant region comprising at least about 85%, 87%, 88%, 89%, 90%, 91%, 92%, 93%, 94%, 95%, 96%, 97%, 98%, 99%, or 100% identity to SEQ ID NO: 362. In some cases, antibody A comprises at least about 80%, 81%, 82%, 83%, 84%, 85%, 85%, 87%, 88%, 89%, 90%, 91%, 92%, 93%, 94%, 95%, 96%, 97%, 98%, 99%, or 100% monomeric fraction as measured by the size exclusion method described in Example 2. In some cases, antibody A is expressed from FreeStyle 293-F (e.g., ThermoFisher Scientific #R79007) cells at an expression level of about or at least about 2, 3, 4, 5, 6, 7, 8, 9, 10, 11, 12, 13, 14, 15, 16, 17, 18, 19, 20, 21, 22, 23, 24, 25, 26, 27, 28, 29, 30, 31, 32, 33, 34, 35, 36, 37, 38, 39, 40, 41, 42, 43, 44, 45, 46, 47, 48, 49, 50, 51, 52, 53, 54, 55, 5, 57, 58, 59 or 60 μg/mL as determined by the method described in Example 2. In some cases, antibody A is expressed from FreeStyle 293-F cells at an expression level of between about 2 μg/mL to about 60 μg/mL. In some cases, antibody A is expressed from FreeStyle 293-F cells at an expression level of between about 10 μg/mL to about 60 μg/mL. In some cases, antibody A comprises a viscosity less than about 30 mPa-s. In some cases, antibody A comprises a viscosity from about 4 mPa-s to about 30 mPa-s, or about 4, 5, 6, 7, 8, 9, 10. 11, 12, 13, 14, 15, 16, 17, 18, 19, 20, 21, 22, 23, 24, 25, 26, 27, 28, 29, 30 mPa-s. In some cases, antibody A is formulated in a solution having a concentration of about 10 mg/ml to about 170 mg/ml, with a viscosity less than about 30 mPa-s. In some cases, the formulation has a pH of about 5 to about 7.5.

[1050] In some embodiments, an anti-TL1A antibody comprises antibody B. As used herein, antibody B comprises the CDRs of antibody B in Table 20. In some cases, antibody B comprises a heavy chain framework comprising SEQ ID NO: 301

(X1VQLVQSGAEVKKPGASVKVSCKAS[HCDR1]WVX2QX3PGQGLEW
X4G[HCDR2]RX5TX6TX7DTSTSTX8YX9ELSSLRSEDTAVYYCAR
[HCDR3]WGQGTTVTVSS),

wherein X1=Q or E, X2=R or K, X3=A or R, X4=M or I, X5=V or A, X6=M or I, X7=R or T, X8=V or A, and X9=M or L. In some cases, antibody B comprises a light chain framework comprising SEQ ID NO: 303 (EIVLTQSPGTLSLSPGERATLSC[LCDR 1]WYQQKPGQAPRX10X11IY[LCDR2]GIPDR FSGSGSGTDFTLTISRLEPEDFAVYYC[LCDR3]FGGGTKLEIK), wherein X10=L or P and X11=L or W. In some cases, antibody B comprises a heavy chain variable region comprising human IGHV1-46*02 framework or a modified human IGHV1-46*02 framework, wherein the modified human IGHV1-46*02 framework has less than or equal to about 1, 2, 3, 4, 5, 6, 7, 8, 9, 10, 11, 12, 13, 14, 15, 16, 17, 18, 19, or 20 amino acid substitutions in the framework. In some cases, antibody B comprises a light chain variable region comprising human IGKV3-20 framework or a modified human IGKV3-20 framework, wherein the modified human IGKV3-20 framework has less than or equal to about 1, 2, 3, 4, 5, 6, 7, 8, 9, 10, 11, 12, 13, 14, 15, 16, 17, 18, 19, or 20 amino acid substitutions in the framework. In some cases, antibody B comprises a constant region comprising reduced ADCC and/or CDC as compared to IgG1. For instance, antibody B comprises a human IgG1 Fc region comprising (a) 297A, 297Q, 297G, or 297D, (b) 279F, 279K, or 279L, (c) 228P, (d) 235A, 235E, 235G, 235Q, 235R, or 235S, (e) 237A, 237E, 237K, 237N, or 237R, (f) 234A, 234V, or 234F, (g) 233P, (h) 328A, (i) 327Q or 327T, (j) 329A, 329G, 329Y, or 329R (k) 331S, (1) 236F or 236R, (m) 238A, 238E, 238G, 238H, 238I, 238V, 238 W, or 238Y, (n) 248A, (o) 254D, 254E, 254G, 254H, 254I, 254N, 254P, 254Q, 254T, or 254V, (p) 255N, (q) 256H, 256K, 256R, or 256V, (r) 264S, (s) 265H, 265K, 265S, 265Y, or 265A, (t) 267G, 267H, 267I, or 267K, (u) 268K, (v) 269N or 269Q, (w) 270A, 270G, 270M, or 270N, (x) 271T, (y) 272N, (z) 292E, 292F, 292G, or 292I, (aa) 293S, (bb) 301 W, (cc) 304E, (dd) 311E, 311G, or 311S, (ee) 316F, (ff) 328V, (gg) 330R, (hh) 339E or 339L, (ii) 343I or 343V, (jj) 373A, 373G, or 373S, (kk) 376E, 376 W, or 376Y, (11) 380D, (mm) 382D or 382P, (nn) 385P, (oo) 424H, 424M, or 424V, (pp) 434I, (qq) 438G, (rr) 439E, 439H, or 439Q, (ss) 440A, 440D, 440E, 440F, 440M, 440T, or 440V, (tt) E233P, (uu) L235E, (vv) L234A and L235A, (ww) L234A, L235A, and G237A, (xx) L234A, L235A, and P329G, (yy) L234F, L235E, and P331 S, (zz) L234A, L235E, and G237A, (aaa), L234A, L235E, G237A, and P331 S (bbb) L234A, L235A, G237A, P238S, H268A, A330S, and P331S (IgG1σ), (ccc) L234A, L235A, and P329A, (ddd) G236R and L328R, (eee) G237A, (fff) F241A, (ggg) V264A, (hhh) D265A, (iii) D265A and N297A, (jjj) D265A and N297G, (kkk) D270A, (111) A330L, (mmm) P331A or P331S, or (nnn) any combination of (a)-(uu), per Kabat numbering. In some cases, antibody B comprises a constant region comprising at least about 85%, 87%, 88%, 89%, 90%, 91%, 92%, 93%, 94%, 95%, 96%, 97%, 98%, 99%, or 100% identity to SEQ ID NO: 320. In some cases, antibody B comprises a constant region comprising at least about 85%, 87%, 88%, 89%, 90%, 91%, 92%, 93%, 94%, 95%, 96%, 97%, 98%, 99%, or 100% identity to SEQ ID NO: 321. In some cases, antibody B comprises a constant region comprising at least about 85%, 87%, 88%, 89%, 90%, 91%, 92%, 93%, 94%, 95%, 96%, 97%, 98%, 99%, or 100% identity to SEQ ID NO: 322. In some cases, antibody B comprises a constant region comprising at least about 85%, 87%, 88%, 89%, 90%, 91%, 92%, 93%, 94%, 95%, 96%, 97%, 98%, 99%, or 100% identity to SEQ ID NO: 323. In some cases, antibody B comprises a constant region comprising at least about 85%, 87%, 88%, 89%, 90%, 91%, 92%, 93%, 94%, 95%, 96%, 97%, 98%, 99%, or 100% identity to SEQ ID NO: 324. In some cases, antibody B comprises a constant region comprising at least about 85%, 87%, 88%, 89%, 90%, 91%, 92%, 93%, 94%, 95%, 96%, 97%, 98%, 99%, or 100% identity to SEQ ID NO: 325. In some cases, antibody B comprises a constant region comprising at least about 85%, 87%, 88%, 89%, 90%, 91%, 92%, 93%, 94%, 95%, 96%, 97%, 98% 99% or 100% identity to SEQ ID NO: 326. In some cases, antibody B comprises a constant region comprising at least about 85%, 87%, 88%, 89%, 90%, 91%, 92%, 93%, 94%, 95%, 96%, 97%, 98%, 99%, or 100% identity to SEQ ID NO: 327. In some cases, antibody B comprises a constant region comprising at least about 85%, 87%, 88%, 89%, 90%, 91%, 92%, 93%, 94%, 95%, 96%, 97%, 98%, 99%, or 100% identity to SEQ ID NO: 328. In some cases, antibody B comprises a constant region comprising at least about 85%, 87%, 88%, 89%, 90%, 91%, 92%, 93%, 94%, 95%, 96%, 97%, 98%, 99%, or 100% identity to SEQ ID NO: 329. In some cases, antibody B comprises a constant region comprising at least about 85%, 87%, 88%, 89%, 90%, 91%, 92%, 93%, 94%, 95%, 96%, 97%, 98%, 99%, or 100% identity to SEQ ID NO: 330. In some cases, antibody B comprises a constant region comprising at least about 85%, 87%, 88%, 89%, 90%, 91%, 92%, 93%, 94%, 95%, 96%, 97%, 98% 99% or 100% identity to SEQ ID NO: 331. In some cases, antibody B comprises a constant region comprising at least about 85%, 87%, 88%, 89%, 90%, 91%, 92%, 93%, 94%, 95%, 96%, 97%, 98%, 99%, or 100% identity to SEQ ID NO: 332. In some cases, antibody B comprises a constant region comprising at least about 85%, 87%, 88%, 89%, 90%, 91%, 92%, 93%, 94%, 95%, 96%, 97%, 98%, 99%, or 100% identity to SEQ ID NO: 333. In some cases, antibody B comprises a constant region comprising at least about 85%, 87%, 88%, 89%, 90%, 91%, 92%, 93%, 94%, 95%, 96%, 97%, 98%, 99%, or 100% identity to SEQ ID NO: 334. In some cases, antibody B comprises a constant region comprising at least about 85%, 87%, 88%, 89%, 90%, 91%, 92%, 93%, 94%, 95%, 96%, 97%, 98%, 99%, or 100% identity to SEQ ID NO: 335. In some cases, antibody B comprises a constant region comprising at least about 85%, 87%, 88%, 89%, 90%, 91%, 92%, 93%, 94%, 95%, 96%, 97%, 98% 99% or 100% identity to SEQ ID NO: 336. In some cases, antibody B comprises a constant region comprising at least about 85%, 87%, 88%, 89%, 90%, 91%, 92%, 93%, 94%, 95%, 96%, 97%, 98%, 99%, or 100% identity to SEQ ID NO: 337. In some cases, antibody B comprises a constant region comprising at least about 85%, 87%, 88%, 89%, 90%, 91%, 92%, 93%, 94%, 95%, 96%, 97%, 98%, 99%, or 100% identity to SEQ ID NO: 338. In some cases, antibody B comprises a constant region comprising at least about 85%, 87%, 88%, 89%, 90%, 91%, 92%, 93%, 94%, 95%, 96%, 97%, 98%, 99%, or 100% identity to SEQ ID NO: 339. In some cases, antibody B comprises a constant region comprising at least about 85%, 87%, 88%, 89%, 90%, 91%, 92%, 93%, 94%, 95%, 96%, 97%, 98%, 99%, or 100% identity to SEQ ID NO: 340. In some cases, antibody B comprises a constant region comprising at least about 85%, 87%, 88%, 89%, 90%, 91%, 92%, 93%, 94%, 95%, 96%, 97%, 98% 99% or 100% identity to SEQ ID NO: 341. In some cases, antibody B comprises a constant region comprising at least about 85%, 87%, 88%, 89%, 90%, 91%, 92%, 93%, 94%, 95%, 96%, 97%, 98%, 99%, or 100% identity to SEQ ID NO: 342. In some cases, antibody B comprises a constant region comprising at least about 85%, 87%, 88%, 89%, 90%, 91%, 92%, 93%, 94%, 95%, 96%, 97%, 98%, 99%, or 100% identity to SEQ ID NO: 343. In some cases, antibody B comprises a constant region comprising at least about 85%, 87%, 88%, 89%, 90%, 91%, 92%, 93%, 94%, 95%, 96%, 97%, 98%, 99%, or 100% identity to SEQ ID NO: 344. In some cases, antibody B comprises a constant region comprising at least about 85%, 87%, 88%, 89%, 90%, 91%, 92%, 93%, 94%, 95%, 96%, 97%, 98%, 99%, or 100% identity to SEQ ID NO: 345. In some cases, antibody B comprises a constant region comprising at least about 85%, 87%, 88%, 89%, 90%, 91%, 92%, 93%, 94%, 95%, 96%, 97%, 98% 99% or 100% identity to SEQ ID NO: 346. In some cases, antibody B comprises a constant region comprising at least about 85%, 87%, 88%, 89%, 90%, 91%, 92%, 93%, 94%, 95%, 96%, 97%, 98%, 99%, or 100% identity to SEQ ID NO: 347. In some cases, antibody B comprises a constant region comprising at least about 85%, 87%, 88%, 89%, 90%, 91%, 92%, 93%, 94%, 95%, 96%, 97%, 98%, 99%, or 100% identity to SEQ ID NO: 348. In some cases, antibody B comprises a constant region comprising at least about 85%, 87%, 88%, 89%, 90%, 91%, 92%, 93%, 94%, 95%, 96%, 97%, 98%, 99%, or 100% identity to SEQ ID NO: 349. In some cases, antibody B comprises a constant region comprising at least about 85%, 87%, 88%, 89%, 90%, 91%, 92%, 93%, 94%, 95%, 96%, 97%, 98%, 99%, or 100% identity to SEQ ID NO: 350. In some cases, antibody B comprises a constant region comprising at least about 85%, 87%, 88%, 89%, 90%, 91%, 92%, 93%, 94%, 95%, 96%, 97%, 98% 99% or 100% identity to SEQ ID NO: 351. In some cases, antibody B comprises a constant region comprising at least about 85%, 87%, 88%, 89%, 90%, 91%, 92%, 93%, 94%, 95%, 96%, 97%, 98%, 99%, or 100% identity to SEQ ID NO: 352. In some cases, antibody B comprises a constant region comprising at least about 85%, 87%, 88%, 89%, 90%, 91%, 92%, 93%, 94%, 95%, 96%, 97%, 98%, 99%, or 100% identity to SEQ ID NO: 353. In some cases, antibody B comprises a constant region comprising at least about 85%, 87%, 88%, 89%, 90%, 91%, 92%, 93%, 94%, 95%, 96%, 97%, 98%, 99%, or 100% identity to SEQ ID NO: 354. In some cases, antibody B comprises a constant region comprising at least about 85%, 87%, 88%, 89%, 90%, 91%, 92%, 93%, 94%, 95%, 96%, 97%, 98%, 99%, or 100% identity to SEQ ID NO: 355. In some cases, antibody B comprises a constant region comprising at least about 85%, 87%, 88%, 89%, 90%, 91%, 92%, 93%, 94%, 95%, 96%, 97%, 98% 99% or 100% identity to SEQ ID NO: 356. In some cases, antibody B comprises a constant region comprising at least about 85%, 87%, 88%, 89%, 90%, 91%, 92%, 93%, 94%, 95%, 96%, 97%, 98%, 99%, or 100% identity to SEQ ID NO: 357. In some cases, antibody B comprises a constant region comprising at least about 85%, 87%, 88%, 89%, 90%, 91%, 92%, 93%, 94%, 95%, 96%, 97%, 98%, 99%, or 100% identity to SEQ ID NO: 358. In some cases, antibody B comprises a constant region comprising at least about 85%, 87%, 88%, 89%, 90%, 91%, 92%, 93%, 94%, 95%, 96%, 97%, 98%, 99%, or 100% identity to SEQ ID NO: 359. In some cases, antibody B comprises a constant region comprising at least about 85%, 87%, 88%, 89%, 90%, 91%, 92%, 93%, 94%, 95%, 96%, 97%, 98%, 99%, or 100% identity to SEQ ID NO: 360. In some cases, antibody B comprises a constant region comprising at least about 85%, 87%, 88%, 89%, 90%, 91%, 92%, 93%, 94%, 95%, 96%, 97%, 98% 99% or 100% identity to SEQ ID NO: 361. In some cases, antibody B comprises a constant region comprising at least about 85%, 87%, 88%, 89%, 90%, 91%, 92%, 93%, 94%, 95%, 96%, 97%, 98%, 99%, or 100% identity to SEQ ID NO: 362. In some cases, antibody B comprises at least about 80%, 81%, 82%, 83%, 84%, 85%, 85%, 87%, 88%, 89%, 90%, 91%, 92%, 93%, 94%, 95%, 96%, 97%, 98%, 99%, or 100% monomeric fraction as measured by the size exclusion method described in Example 2. In some cases, antibody B is expressed from FreeStyle 293-F cells at an expression level of about or at least about 2, 3, 4, 5, 6, 7, 8, 9, 10, 11, 12, 13, 14, 15, 16, 17, 18, 19, 20, 21, 22, 23, 24, 25, 26, 27, 28, 29, 30, 31, 32, 33, 34, 35, 36, 37, 38, 39, 40, 41, 42, 43, 44, 45, 46, 47, 48, 49, 50, 51, 52, 53, 54, 55, 5, 57, 58, 59 or 60 μg/mL as determined by the method described in Example 2. In some cases, antibody B is expressed from FreeStyle 293-F cells at an expression level of between about 2 μg/mL to about 60 μg/mL. In some cases, antibody B is expressed from FreeStyle 293-F cells at an expression level of between about 10 μg/mL to about 60 μg/mL.

[1051] In some embodiments, an anti-TL1A antibody comprises antibody C. As used herein, antibody C comprises the CDRs of antibody C in Table 20. In some cases, antibody C comprises a heavy chain framework comprising SEQ ID NO: 301

(X1VQLVQSGAEVKKPGASVKVSCKAS[HCDR1]WVX2QX3PGQGLEW
X4G[HCDR2]RX5TX6TX7DTSTSTX8YX9ELSSLRSEDTAVYYCAR
[HCDR3]WGQGTTVTVSS),

wherein X1=Q or E, X2=R or K, X3=A or R, X4=M or I, X5=V or A, X6=M or I, X7=R or T, X8=V or A, and X9=M or L. In some cases, antibody C comprises a light chain framework comprising SEQ ID NO: 303 (EIVLTQSPGTLSLSPGERATLSC[LCDR 1]WYQQKPGQAPRX10X11IY[LCDR2]GIPDR FSGSGSGTDFTLTISRLEPEDFAVYYC[LCDR3]FGGGTKLEIK), wherein X10=L or P and X11=L or W. In some cases, antibody C comprises a heavy chain variable region comprising human IGHV1-46*02 framework or a modified human IGHV1-46*02 framework, wherein the modified human IGHV1-46*02 framework has less than or equal to about 1, 2, 3, 4, 5, 6, 7, 8, 9, 10, 11, 12, 13, 14, 15, 16, 17, 18, 19, or 20 amino acid substitutions in the framework. In some cases, antibody C comprises a light chain variable region comprising human IGKV3-20 framework or a modified human IGKV3-20 framework, wherein the modified human IGKV3-20 framework has less than or equal to about 1, 2, 3, 4, 5, 6, 7, 8, 9, 10, 11, 12, 13, 14, 15, 16, 17, 18, 19, or 20 amino acid substitutions in the framework. In some cases, antibody C comprises a constant region comprising reduced ADCC and/or CDC as compared to IgG1. For instance, antibody C comprises a human IgG1 Fc region comprising (a) 297A, 297Q, 297G, or 297D, (b) 279F, 279K, or 279L, (c) 228P, (d) 235A, 235E, 235G, 235Q, 235R, or 235S, (e) 237A, 237E, 237K, 237N, or 237R, (f) 234A, 234V, or 234F, (g) 233P, (h) 328A, (i) 327Q or 327T, (j) 329A, 329G, 329Y, or 329R (k) 331S, (1) 236F or 236R, (m) 238A, 238E, 238G, 238H, 238I, 238V, 238 W, or 238Y, (n) 248A, (o) 254D, 254E, 254G, 254H, 254I, 254N, 254P, 254Q, 254T, or 254V, (p) 255N, (q) 256H, 256K, 256R, or 256V, (r) 264S, (s) 265H, 265K, 265S, 265Y, or 265A, (t) 267G, 267H, 267I, or 267K, (u) 268K, (v) 269N or 269Q, (w) 270A, 270G, 270M, or 270N, (x) 271T, (y) 272N, (z) 292E, 292F, 292G, or 292I, (aa) 293S, (bb) 301 W, (cc) 304E, (dd) 311E, 311G, or 311S, (ee) 316F, (ff) 328V, (gg) 330R, (hh) 339E or 339L, (ii) 343I or 343V, (jj) 373A, 373G, or 373S, (kk) 376E, 376 W, or 376Y, (11) 380D, (mm) 382D or 382P, (nn) 385P, (oo) 424H, 424M, or 424V, (pp) 434I, (qq) 438G, (rr) 439E, 439H, or 439Q, (ss) 440A, 440D, 440E, 440F, 440M, 440T, or 440V, (tt) E233P, (uu) L235E, (vv) L234A and L235A, (ww) L234A, L235A, and G237A, (xx) L234A, L235A, and P329G, (yy) L234F, L235E, and P331 S, (zz) L234A, L235E, and G237A, (aaa), L234A, L235E, G237A, an d P331S (bbb) L234A, L235A, G237A, P238S, H268A, A330S, and P331S (IgG16), (ccc) L234A, L235A, and P329A, (ddd) G236R and L328R, (eee) G237A, (fff) F241A, (ggg) V264A, (hhh) D265A, (iii) D265A and N297A, (jjj) D265A and N297G, (kkk) D270A, (111) A330L, (mmm) P331A or P331S, or (nnn) any combination of (a)-(uu), per Kabat numbering. In some cases, antibody C comprises a constant region comprising at least about 85%, 87%, 88%, 89%, 90%, 91%, 92%, 93%, 94%, 95%, 96%, 97%, 98%, 99%, or 100% identity to SEQ ID NO: 320. In some cases, antibody C comprises a constant region comprising at least about 85%, 87%, 88%, 89%, 90%, 91%, 92%, 93%, 94%, 95%, 96%, 97%, 98%, 99%, or 100% identity to SEQ ID NO: 321. In some cases, antibody C comprises a constant region comprising at least about 85%, 87%, 88%, 89%, 90%, 91%, 92%, 93%, 94%, 95%, 96%, 97%, 98%, 99%, or 100% identity to SEQ ID NO: 322. In some cases, antibody C comprises a constant region comprising at least about 85%, 87%, 88%, 89%, 90%, 91%, 92%, 93%, 94%, 95%, 96%, 97%, 98%, 99%, or 100% identity to SEQ ID NO: 323. In some cases, antibody C comprises a constant region comprising at least about 85%, 87%, 88%, 89%, 90%, 91%, 92%, 93%, 94%, 95%, 96%, 97%, 98%, 99%, or 100% identity to SEQ ID NO: 324. In some cases, antibody C comprises a constant region comprising at least about 85%, 87%, 88%, 89%, 90%, 91%, 92%, 93%, 94%, 95%, 96%, 97%, 98%, 99%, or 100% identity to SEQ ID NO: 325. In some cases, antibody C comprises a constant region comprising at least about 85%, 87%, 88%, 89%, 90%, 91%, 92%, 93%, 94%, 95%, 96%, 97%, 98% 99% or 100% identity to SEQ ID NO: 326. In some cases, antibody C comprises a constant region comprising at least about 85%, 87%, 88%, 89%, 90%, 91%, 92%, 93%, 94%, 95%, 96%, 97%, 98%, 99%, or 100% identity to SEQ ID NO: 327. In some cases, antibody C comprises a constant region comprising at least about 85%, 87%, 88%, 89%, 90%, 91%, 92%, 93%, 94%, 95%, 96%, 97%, 98%, 99%, or 100% identity to SEQ ID NO: 328. In some cases, antibody C comprises a constant region comprising at least about 85%, 87%, 88%, 89%, 90%, 91%, 92%, 93%, 94%, 95%, 96%, 97%, 98%, 99%, or 100% identity to SEQ ID NO: 329. In some cases, antibody C comprises a constant region comprising at least about 85%, 87%, 88%, 89%, 90%, 91%, 92%, 93%, 94%, 95%, 96%, 97%, 98%, 99%, or 100% identity to SEQ ID NO: 330. In some cases, antibody C comprises a constant region comprising at least about 85%, 87%, 88%, 89%, 90%, 91%, 92%, 93%, 94%, 95%, 96%, 97%, 98% 99% or 100% identity to SEQ ID NO: 331. In some cases, antibody C comprises a constant region comprising at least about 85%, 87%, 88%, 89%, 90%, 91%, 92%, 93%, 94%, 95%, 96%, 97%, 98%, 99%, or 100% identity to SEQ ID NO: 332. In some cases, antibody C comprises a constant region comprising at least about 85%, 87%, 88%, 89%, 90%, 91%, 92%, 93%, 94%, 95%, 96%, 97%, 98%, 99%, or 100% identity to SEQ ID NO: 333. In some cases, antibody C comprises a constant region comprising at least about 85%, 87%, 88%, 89%, 90%, 91%, 92%, 93%, 94%, 95%, 96%, 97%, 98%, 99%, or 100% identity to SEQ ID NO: 334. In some cases, antibody C comprises a constant region comprising at least about 85%, 87%, 88%, 89%, 90%, 91%, 92%, 93%, 94%, 95%, 96%, 97%, 98%, 99%, or 100% identity to SEQ ID NO: 335. In some cases, antibody C comprises a constant region comprising at least about 85%, 87%, 88%, 89%, 90%, 91%, 92%, 93%, 94%, 95%, 96%, 97%, 98% 99% or 100% identity to SEQ ID NO: 336. In some cases, antibody C comprises a constant region comprising at least about 85%, 87%, 88%, 89%, 90%, 91%, 92%, 93%, 94%, 95%, 96%, 97%, 98%, 99%, or 100% identity to SEQ ID NO: 337. In some cases, antibody C comprises a constant region comprising at least about 85%, 87%, 88%, 89%, 90%, 91%, 92%, 93%, 94%, 95%, 96%, 97%, 98%, 99%, or 100% identity to SEQ ID NO: 338. In some cases, antibody C comprises a constant region comprising at least about 85%, 87%, 88%, 89%, 90%, 91%, 92%, 93%, 94%, 95%, 96%, 97%, 98%, 99%, or 100% identity to SEQ ID NO: 339. In some cases, antibody C comprises a constant region comprising at least about 85%, 87%, 88%, 89%, 90%, 91%, 92%, 93%, 94%, 95%, 96%, 97%, 98%, 99%, or 100% identity to SEQ ID NO: 340. In some cases, antibody C comprises a constant region comprising at least about 85%, 87%, 88%, 89%, 90%, 91%, 92%, 93%, 94%, 95%, 96%, 97%, 98% 99% or 100% identity to SEQ ID NO: 341. In some cases, antibody C comprises a constant region comprising at least about 85%, 87%, 88%, 89%, 90%, 91%, 92%, 93%, 94%, 95%, 96%, 97%, 98%, 99%, or 100% identity to SEQ ID NO: 342. In some cases, antibody C comprises a constant region comprising at least about 85%, 87%, 88%, 89%, 90%, 91%, 92%, 93%, 94%, 95%, 96%, 97%, 98%, 99%, or 100% identity to SEQ ID NO: 343. In some cases, antibody C comprises a constant region comprising at least about 85%, 87%, 88%, 89%, 90%, 91%, 92%, 93%, 94%, 95%, 96%, 97%, 98%, 99%, or 100% identity to SEQ ID NO: 344. In some cases, antibody C comprises a constant region comprising at least about 85%, 87%, 88%, 89%, 90%, 91%, 92%, 93%, 94%, 95%, 96%, 97%, 98%, 99%, or 100% identity to SEQ ID NO: 345. In some cases, antibody C comprises a constant region comprising at least about 85%, 87%, 88%, 89%, 90%, 91%, 92%, 93%, 94%, 95%, 96%, 97%, 98% 99% or 100% identity to SEQ ID NO: 346. In some cases, antibody C comprises a constant region comprising at least about 85%, 87%, 88%, 89%, 90%, 91%, 92%, 93%, 94%, 95%, 96%, 97%, 98%, 99%, or 100% identity to SEQ ID NO: 347. In some cases, antibody C comprises a constant region comprising at least about 85%, 87%, 88%, 89%, 90%, 91%, 92%, 93%, 94%, 95%, 96%, 97%, 98%, 99%, or 100% identity to SEQ ID NO: 348. In some cases, antibody C comprises a constant region comprising at least about 85%, 87%, 88%, 89%, 90%, 91%, 92%, 93%, 94%, 95%, 96%, 97%, 98%, 99%, or 100% identity to SEQ ID NO: 349. In some cases, antibody C comprises a constant region comprising at least about 85%, 87%, 88%, 89%, 90%, 91%, 92%, 93%, 94%, 95%, 96%, 97%, 98%, 99%, or 100% identity to SEQ ID NO: 350. In some cases, antibody C comprises a constant region comprising at least about 85%, 87%, 88%, 89%, 90%, 91%, 92%, 93%, 94%, 95%, 96%, 97%, 98% 99% or 100% identity to SEQ ID NO: 351. In some cases, antibody C comprises a constant region comprising at least about 85%, 87%, 88%, 89%, 90%, 91%, 92%, 93%, 94%, 95%, 96%, 97%, 98%, 99%, or 100% identity to SEQ ID NO: 352. In some cases, antibody C comprises a constant region comprising at least about 85%, 87%, 88%, 89%, 90%, 91%, 92%, 93%, 94%, 95%, 96%, 97%, 98%, 99%, or 100% identity to SEQ ID NO: 353. In some cases, antibody C comprises a constant region comprising at least about 85%, 87%, 88%, 89%, 90%, 91%, 92%, 93%, 94%, 95%, 96%, 97%, 98%, 99%, or 100% identity to SEQ ID NO: 354. In some cases, antibody C comprises a constant region comprising at least about 85%, 87%, 88%, 89%, 90%, 91%, 92%, 93%, 94%, 95%, 96%, 97%, 98%, 99%, or 100% identity to SEQ ID NO: 355. In some cases, antibody C comprises a constant region comprising at least about 85%, 87%, 88%, 89%, 90%, 91%, 92%, 93%, 94%, 95%, 96%, 97%, 98% 99% or 100% identity to SEQ ID NO: 356. In some cases, antibody C comprises a constant region comprising at least about 85%, 87%, 88%, 89%, 90%, 91%, 92%, 93%, 94%, 95%, 96%, 97%, 98%, 99%, or 100% identity to SEQ ID NO: 357. In some cases, antibody C comprises a constant region comprising at least about 85%, 87%, 88%, 89%, 90%, 91%, 92%, 93%, 94%, 95%, 96%, 97%, 98%, 99%, or 100% identity to SEQ ID NO: 358. In some cases, antibody C comprises a constant region comprising at least about 85%, 87%, 88%, 89%, 90%, 91%, 92%, 93%, 94%, 95%, 96%, 97%, 98%, 99%, or 100% identity to SEQ ID NO: 359. In some cases, antibody C comprises a constant region comprising at least about 85%, 87%, 88%, 89%, 90%, 91%, 92%, 93%, 94%, 95%, 96%, 97%, 98%, 99%, or 100% identity to SEQ ID NO: 360. In some cases, antibody C comprises a constant region comprising at least about 85%, 87%, 88%, 89%, 90%, 91%, 92%, 93%, 94%, 95%, 96%, 97%, 98% 99% or 100% identity to SEQ ID NO: 361. In some cases, antibody C comprises a constant region comprising at least about 85%, 87%, 88%, 89%, 90%, 91%, 92%, 93%, 94%, 95%, 96%, 97%, 98%, 99%, or 100% identity to SEQ ID NO: 362. In some cases, antibody C comprises at least about 80%, 81%, 82%, 83%, 84%, 85%, 85%, 87%, 88%, 89%, 90%, 91%, 92%, 93%, 94%, 95%, 96%, 97%, 98%, 99%, or 100% monomeric fraction as measured by the size exclusion method described in Example 2. In some cases, antibody C is expressed from FreeStyle 293-F cells at an expression level of about or at least about 2, 3, 4, 5, 6, 7, 8, 9, 10, 11, 12, 13, 14, 15, 16, 17, 18, 19, 20, 21, 22, 23, 24, 25, 26, 27, 28, 29, 30, 31, 32, 33, 34, 35, 36, 37, 38, 39, 40, 41, 42, 43, 44, 45, 46, 47, 48, 49, 50, 51, 52, 53, 54, 55, 5, 57, 58, 59 or 60 μg/mL as determined by the method described in Example 2. In some cases, antibody C is expressed from FreeStyle 293-F cells at an expression level of between about 2 μg/mL to about 60 μg/mL. In some cases, antibody C is expressed from FreeStyle 293-F cells at an expression level of between about 10 μg/mL to about 60 μg/mL.

[1052] In some embodiments, an anti-TL1A antibody comprises antibody D. As used herein, antibody D comprises the CDRs of antibody Din Table 20. In some cases, antibody D comprises a heavy chain framework comprising SEQ ID NO: 301

(X1VQLVQSGAEVKKPGASVKVSCKAS[HCDR1]WVX2QX3PGQGLEW
X4G[HCDR2]RX5TX6TX7DTSTSTX8YX9ELSSLRSEDTAVYYCAR
[HCDR3]WGQGTTVTVSS),

wherein X1=Q or E, X2=R or K, X3=A or R, X4=M or I, X5=V or A, X6=M or I, X7=R or T, X8=V or A, and X9=M or L. In some cases, antibody D comprises a light chain framework comprising SEQ ID NO: 303 (EIVLTQSPGTLSLSPGERATLSC[LCDR 1]WYQQKPGQAPRX10X11IY[LCDR2]GIPDR FSGSGSGTDFTLTISRLEPEDFAVYYC[LCDR3]FGGGTKLEIK), wherein X10=L or P and X11=L or W. In some cases, antibody D comprises a heavy chain variable region comprising human IGHV1-46*02 framework or a modified human IGHV1-46*02 framework, wherein the modified human IGHV1-46*02 framework has less than or equal to about 1, 2, 3, 4, 5, 6, 7, 8, 9, 10, 11, 12, 13, 14, 15, 16, 17, 18, 19, or 20 amino acid substitutions in the framework. In some cases, antibody D comprises a light chain variable region comprising human IGKV3-20 framework or a modified human IGKV3-20 framework, wherein the modified human IGKV3-20 framework has less than or equal to about 1, 2, 3, 4, 5, 6, 7, 8, 9, 10, 11, 12, 13, 14, 15, 16, 17, 18, 19, or 20 amino acid substitutions in the framework. In some cases, antibody D comprises a constant region comprising reduced ADCC and/or CDC as compared to IgG1. For instance, antibody D comprises a human IgG1 Fc region comprising (a) 297A, 297Q, 297G, or 297D, (b) 279F, 279K, or 279L, (c) 228P, (d) 235A, 235E, 235G, 235Q, 235R, or 235S, (e) 237A, 237E, 237K, 237N, or 237R, (f) 234A, 234V, or 234F, (g) 233P, (h) 328A, (i) 327Q or 327T, (j) 329A, 329G, 329Y, or 329R (k) 331S, (1) 236F or 236R, (m) 238A, 238E, 238G, 238H, 238I, 238V, 238 W, or 238Y, (n) 248A, (o) 254D, 254E, 254G, 254H, 254I, 254N, 254P, 254Q, 254T, or 254V, (p) 255N, (q) 256H, 256K, 256R, or 256V, (r) 264S, (s) 265H, 265K, 265S, 265Y, or 265A, (t) 267G, 267H, 267I, or 267K, (u) 268K, (v) 269N or 269Q, (w) 270A, 270G, 270M, or 270N, (x) 271T, (y) 272N, (z) 292E, 292F, 292G, or 292I, (aa) 293S, (bb) 301 W, (cc) 304E, (dd) 311E, 311G, or 311S, (ee) 316F, (ff) 328V, (gg) 330R, (hh) 339E or 339L, (ii) 343I or 343V, (jj) 373A, 373G, or 373S, (kk) 376E, 376 W, or 376Y, (11) 380D, (mm) 382D or 382P, (nn) 385P, (oo) 424H, 424M, or 424V, (pp) 434I, (qq) 438G, (rr) 439E, 439H, or 439Q, (ss) 440A, 440D, 440E, 440F, 440M, 440T, or 440V, (tt) E233P, (uu) L235E, (vv) L234A and L235A, (ww) L234A, L235A, and G237A, (xx) L234A, L235A, and P329G, (yy) L234F, L235E, and P331 S, (zz) L234A, L235E, and G237A, (aaa), L234A, L235E, G237A, and P331S (bbb) L234A, L235A, G237A, P238S, H268A, A330S, and P331S (IgG1σ), (ccc) L234A, L235A, and P329A, (ddd) G236R and L328R, (eee) G237A, (fff) F241A, (ggg) V264A, (hhh) D265A, (iii) D265A and N297A, (jjj) D265A and N297G, (kkk) D270A, (111) A330L, (mmm) P331A or P331S, or (nnn) any combination of (a)-(uu), per Kabat numbering. In some cases, antibody D comprises a constant region comprising at least about 85%, 87%, 88%, 89%, 90%, 91%, 92%, 93%, 94%, 95%, 96%, 97%, 98%, 99%, or 100% identity to SEQ ID NO: 320. In some cases, antibody D comprises a constant region comprising at least about 85%, 87%, 88%, 89%, 90%, 91%, 92%, 93%, 94%, 95%, 96%, 97%, 98%, 99%, or 100% identity to SEQ ID NO: 321. In some cases, antibody D comprises a constant region comprising at least about 85%, 87%, 88%, 89%, 90%, 91%, 92%, 93%, 94%, 95%, 96%, 97%, 98%, 99%, or 100% identity to SEQ ID NO: 322. In some cases, antibody D comprises a constant region comprising at least about 85%, 87%, 88%, 89%, 90%, 91%, 92%, 93%, 94%, 95%, 96%, 97%, 98%, 99%, or 100% identity to SEQ ID NO: 323. In some cases, antibody D comprises a constant region comprising at least about 85%, 87%, 88%, 89%, 90%, 91%, 92%, 93%, 94%, 95%, 96%, 97%, 98%, 99%, or 100% identity to SEQ ID NO: 324. In some cases, antibody D comprises a constant region comprising at least about 85%, 87%, 88%, 89%, 90%, 91%, 92%, 93%, 94%, 95%, 96%, 97%, 98%, 99%, or 100% identity to SEQ ID NO: 325. In some cases, antibody D comprises a constant region comprising at least about 85%, 87%, 88%, 89%, 90%, 91%, 92%, 93%, 94%, 95%, 96%, 97%, 98% 99% or 100% identity to SEQ ID NO: 326. In some cases, antibody D comprises a constant region comprising at least about 85%, 87%, 88%, 89%, 90%, 91%, 92%, 93%, 94%, 95%, 96%, 97%, 98%, 99%, or 100% identity to SEQ ID NO: 327. In some cases, antibody D comprises a constant region comprising at least about 85%, 87%, 88%, 89%, 90%, 91%, 92%, 93%, 94%, 95%, 96%, 97%, 98%, 99%, or 100% identity to SEQ ID NO: 328. In some cases, antibody D comprises a constant region comprising at least about 85%, 87%, 88%, 89%, 90%, 91%, 92%, 93%, 94%, 95%, 96%, 97%, 98%, 99%, or 100% identity to SEQ ID NO: 329. In some cases, antibody D comprises a constant region comprising at least about 85%, 87%, 88%, 89%, 90%, 91%, 92%, 93%, 94%, 95%, 96%, 97%, 98%, 99%, or 100% identity to SEQ ID NO: 330. In some cases, antibody D comprises a constant region comprising at least about 85%, 87%, 88%, 89%, 90%, 91%, 92%, 93%, 94%, 95%, 96%, 97%, 98% 99% or 100% identity to SEQ ID NO: 331. In some cases, antibody D comprises a constant region comprising at least about 85%, 87%, 88%, 89%, 90%, 91%, 92%, 93%, 94%, 95%, 96%, 97%, 98%, 99%, or 100% identity to SEQ ID NO: 332. In some cases, antibody D comprises a constant region comprising at least about 85%, 87%, 88%, 89%, 90%, 91%, 92%, 93%, 94%, 95%, 96%, 97%, 98%, 99%, or 100% identity to SEQ ID NO: 333. In some cases, antibody D comprises a constant region comprising at least about 85%, 87%, 88%, 89%, 90%, 91%, 92%, 93%, 94%, 95%, 96%, 97%, 98%, 99%, or 100% identity to SEQ ID NO: 334. In some cases, antibody D comprises a constant region comprising at least about 85%, 87%, 88%, 89%, 90%, 91%, 92%, 93%, 94%, 95%, 96%, 97%, 98%, 99%, or 100% identity to SEQ ID NO: 335. In some cases, antibody D comprises a constant region comprising at least about 85%, 87%, 88%, 89%, 90%, 91%, 92%, 93%, 94%, 95%, 96%, 97%, 98% 99% or 100% identity to SEQ ID NO: 336. In some cases, antibody D comprises a constant region comprising at least about 85%, 87%, 88%, 89%, 90%, 91%, 92%, 93%, 94%, 95%, 96%, 97%, 98%, 99%, or 100% identity to SEQ ID NO: 337. In some cases, antibody D comprises a constant region comprising at least about 85%, 87%, 88%, 89%, 90%, 91%, 92%, 93%, 94%, 95%, 96%, 97%, 98%, 99%, or 100% identity to SEQ ID NO: 338. In some cases, antibody D comprises a constant region comprising at least about 85%, 87%, 88%, 89%, 90%, 91%, 92%, 93%, 94%, 95%, 96%, 97%, 98%, 99%, or 100% identity to SEQ ID NO: 339. In some cases, antibody D comprises a constant region comprising at least about 85%, 87%, 88%, 89%, 90%, 91%, 92%, 93%, 94%, 95%, 96%, 97%, 98%, 99%, or 100% identity to SEQ ID NO: 340. In some cases, antibody D comprises a constant region comprising at least about 85%, 87%, 88%, 89%, 90%, 91%, 92%, 93%, 94%, 95%, 96%, 97%, 98% 99% or 100% identity to SEQ ID NO: 341. In some cases, antibody D comprises a constant region comprising at least about 85%, 87%, 88%, 89%, 90%, 91%, 92%, 93%, 94%, 95%, 96%, 97%, 98%, 99%, or 100% identity to SEQ ID NO: 342. In some cases, antibody D comprises a constant region comprising at least about 85%, 87%, 88%, 89%, 90%, 91%, 92%, 93%, 94%, 95%, 96%, 97%, 98%, 99%, or 100% identity to SEQ ID NO: 343. In some cases, antibody D comprises a constant region comprising at least about 85%, 87%, 88%, 89%, 90%, 91%, 92%, 93%, 94%, 95%, 96%, 97%, 98%, 99%, or 100% identity to SEQ ID NO: 344. In some cases, antibody D comprises a constant region comprising at least about 85%, 87%, 88%, 89%, 90%, 91%, 92%, 93%, 94%, 95%, 96%, 97%, 98%, 99%, or 100% identity to SEQ ID NO: 345. In some cases, antibody D comprises a constant region comprising at least about 85%, 87%, 88%, 89%, 90%, 91%, 92%, 93%, 94%, 95%, 96%, 97%, 98% 99% or 100% identity to SEQ ID NO: 346. In some cases, antibody D comprises a constant region comprising at least about 85%, 87%, 88%, 89%, 90%, 91%, 92%, 93%, 94%, 95%, 96%, 97%, 98%, 99%, or 100% identity to SEQ ID NO: 347. In some cases, antibody D comprises a constant region comprising at least about 85%, 87%, 88%, 89%, 90%, 91%, 92%, 93%, 94%, 95%, 96%, 97%, 98%, 99%, or 100% identity to SEQ ID NO: 348. In some cases, antibody D comprises a constant region comprising at least about 85%, 87%, 88%, 89%, 90%, 91%, 92%, 93%, 94%, 95%, 96%, 97%, 98%, 99%, or 100% identity to SEQ ID NO: 349. In some cases, antibody D comprises a constant region comprising at least about 85%, 87%, 88%, 89%, 90%, 91%, 92%, 93%, 94%, 95%, 96%, 97%, 98%, 99%, or 100% identity to SEQ ID NO: 350. In some cases, antibody D comprises a constant region comprising at least about 85%, 87%, 88%, 89%, 90%, 91%, 92%, 93%, 94%, 95%, 96%, 97%, 98% 99% or 100% identity to SEQ ID NO: 351. In some cases, antibody D comprises a constant region comprising at least about 85%, 87%, 88%, 89%, 90%, 91%, 92%, 93%, 94%, 95%, 96%, 97%, 98%, 99%, or 100% identity to SEQ ID NO: 352. In some cases, antibody D comprises a constant region comprising at least about 85%, 87%, 88%, 89%, 90%, 91%, 92%, 93%, 94%, 95%, 96%, 97%, 98%, 99%, or 100% identity to SEQ ID NO: 353. In some cases, antibody D comprises a constant region comprising at least about 85%, 87%, 88%, 89%, 90%, 91%, 92%, 93%, 94%, 95%, 96%, 97%, 98%, 99%, or 100% identity to SEQ ID NO: 354. In some cases, antibody D comprises a constant region comprising at least about 85%, 87%, 88%, 89%, 90%, 91%, 92%, 93%, 94%, 95%, 96%, 97%, 98%, 99%, or 100% identity to SEQ ID NO: 355. In some cases, antibody D comprises a constant region comprising at least about 85%, 87%, 88%, 89%, 90%, 91%, 92%, 93%, 94%, 95%, 96%, 97%, 98% 99% or 100% identity to SEQ ID NO: 356. In some cases, antibody D comprises a constant region comprising at least about 85%, 87%, 88%, 89%, 90%, 91%, 92%, 93%, 94%, 95%, 96%, 97%, 98%, 99%, or 100% identity to SEQ ID NO: 357. In some cases, antibody D comprises a constant region comprising at least about 85%, 87%, 88%, 89%, 90%, 91%, 92%, 93%, 94%, 95%, 96%, 97%, 98%, 99%, or 100% identity to SEQ ID NO: 358. In some cases, antibody D comprises a constant region comprising at least about 85%, 87%, 88%, 89%, 90%, 91%, 92%, 93%, 94%, 95%, 96%, 97%, 98%, 99%, or 100% identity to SEQ ID NO: 359. In some cases, antibody D comprises a constant region comprising at least about 85%, 87%, 88%, 89%, 90%, 91%, 92%, 93%, 94%, 95%, 96%, 97%, 98%, 99%, or 100% identity to SEQ ID NO: 360. In some cases, antibody D comprises a constant region comprising at least about 85%, 87%, 88%, 89%, 90%, 91%, 92%, 93%, 94%, 95%, 96%, 97%, 98% 99% or 100% identity to SEQ ID NO: 361. In some cases, antibody D comprises a constant region comprising at least about 85%, 87%, 88%, 89%, 90%, 91%, 92%, 93%, 94%, 95%, 96%, 97%, 98%, 99%, or 100% identity to SEQ ID NO: 362. In some cases, antibody D comprises at least about 80%, 81%, 82%, 83%, 84%, 85%, 85%, 87%, 88%, 89%, 90%, 91%, 92%, 93%, 94%, 95%, 96%, 97%, 98%, 99%, or 100% monomeric fraction as measured by the size exclusion method described in Example 2. In some cases, antibody D is expressed from FreeStyle 293-F cells at an expression level of about or at least about 2, 3, 4, 5, 6, 7, 8, 9, 10, 11, 12, 13, 14, 15, 16, 17, 18, 19, 20, 21, 22, 23, 24, 25, 26, 27, 28, 29, 30, 31, 32, 33, 34, 35, 36, 37, 38, 39, 40, 41, 42, 43, 44, 45, 46, 47, 48, 49, 50, 51, 52, 53, 54, 55, 5, 57, 58, 59 or 60 μg/mL as determined by the method described in Example 2. In some cases, antibody D is expressed from FreeStyle 293-F cells at an expression level of between about 2 μg/mL to about 60 μg/mL. In some cases, antibody D is expressed from FreeStyle 293-F cells at an expression level of between about 10 μg/mL to about 60 μg/mL.

[1053] In some embodiments, an anti-TL1A antibody comprises antibody E. As used herein, antibody E comprises the CDRs of antibody E in Table 20. In some cases, antibody E comprises a heavy chain framework comprising SEQ ID NO: 301

(X1VQLVQSGAEVKKPGASVKVSCKAS[HCDR1]WVX2QX3PGQGLEW
X4G[HCDR2]RX5TX6TX7DTSTSTX8YX9ELSSLRSEDTAVYYCAR
[HCDR3]WGQGTTVTVSS),

wherein X1=Q or E, X2=R or K, X3=A or R, X4=M or I, X5=V or A, X6=M or I, X7=R or T, X8=V or A, and X9=M or L. In some cases, antibody E comprises a light chain framework comprising SEQ ID NO: 303 (EIVLTQSPGTLSLSPGERATLSC[LCDR 1]WYQQKPGQAPRX10X11IY[LCDR2]GIPDR FSGSGSGTDFTLTISRLEPEDFAVYYC[LCDR3]FGGGTKLEIK), wherein X10=L or P and X11=L or W. In some cases, antibody E comprises a heavy chain variable region comprising human IGHV1-46*02 framework or a modified human IGHV1-46*02 framework, wherein the modified human IGHV1-46*02 framework has less than or equal to about 1, 2, 3, 4, 5, 6, 7, 8, 9, 10, 11, 12, 13, 14, 15, 16, 17, 18, 19, or 20 amino acid substitutions in the framework. In some cases, antibody E comprises a light chain variable region comprising human IGKV3-20 framework or a modified human IGKV3-20 framework, wherein the modified human IGKV3-20 framework has less than or equal to about 1, 2, 3, 4, 5, 6, 7, 8, 9, 10, 11, 12, 13, 14, 15, 16, 17, 18, 19, or 20 amino acid substitutions in the framework. In some cases, antibody E comprises a constant region comprising reduced ADCC and/or CDC as compared to IgG1. For instance, antibody E comprises a human IgG1 Fc region comprising (a) 297A, 297Q, 297G, or 297D, (b) 279F, 279K, or 279L, (c) 228P, (d) 235A, 235E, 235G, 235Q, 235R, or 235S, (e) 237A, 237E, 237K, 237N, or 237R, (f) 234A, 234V, or 234F, (g) 233P, (h) 328A, (i) 327Q or 327T, (j) 329A, 329G, 329Y, or 329R (k) 331S, (1) 236F or 236R, (m) 238A, 238E, 238G, 238H, 238I, 238V, 238 W, or 238Y, (n) 248A, (o) 254D, 254E, 254G, 254H, 254I, 254N, 254P, 254Q, 254T, or 254V, (p) 255N, (q) 256H, 256K, 256R, or 256V, (r) 264S, (s) 265H, 265K, 265S, 265Y, or 265A, (t) 267G, 267H, 267I, or 267K, (u) 268K, (v) 269N or 269Q, (w) 270A, 270G, 270M, or 270N, (x) 271T, (y) 272N, (z) 292E, 292F, 292G, or 292I, (aa) 293S, (bb) 301 W, (cc) 304E, (dd) 311E, 311G, or 311S, (ee) 316F, (ff) 328V, (gg) 330R, (hh) 339E or 339L, (ii) 343I or 343V, (jj) 373A, 373G, or 373S, (kk) 376E, 376 W, or 376Y, (11) 380D, (mm) 382D or 382P, (nn) 385P, (oo) 424H, 424M, or 424V, (pp) 434I, (qq) 438G, (rr) 439E, 439H, or 439Q, (ss) 440A, 440D, 440E, 440F, 440M, 440T, or 440V, (tt) E233P, (uu) L235E, (vv) L234A and L235A, (ww) L234A, L235A, and G237A, (xx) L234A, L235A, and P329G, (yy) L234F, L235E, and P331 S, (zz) L234A, L235E, and G237A, (aaa), L234A, L235E, G237A, and P331S (bbb) L234A, L235A, G237A, P238S, H268A, A330S, and P331S (IgG1σ), (ccc) L234A, L235A, and P329A, (ddd) G236R and L328R, (eee) G237A, (fff) F241A, (ggg) V264A, (hhh) D265A, (iii) D265A and N297A, (jjj) D265A and N297G, (kkk) D270A, (111) A330L, (mmm) P331A or P331S, or (nnn) any combination of (a)-(uu), per Kabat numbering. In some cases, antibody E comprises a constant region comprising at least about 85%, 87%, 88%, 89%, 90%, 91%, 92%, 93%, 94%, 95%, 96%, 97%, 98%, 99%, or 100% identity to SEQ ID NO: 320. In some cases, antibody E comprises a constant region comprising at least about 85%, 87%, 88%, 89%, 90%, 91%, 92%, 93%, 94%, 95%, 96%, 97%, 98%, 99%, or 100% identity to SEQ ID NO: 321. In some cases, antibody E comprises a constant region comprising at least about 85%, 87%, 88%, 89%, 90%, 91%, 92%, 93%, 94%, 95%, 96%, 97%, 98%, 99%, or 100% identity to SEQ ID NO: 322. In some cases, antibody E comprises a constant region comprising at least about 85%, 87%, 88%, 89%, 90%, 91%, 92%, 93%, 94%, 95%, 96%, 97%, 98%, 99%, or 100% identity to SEQ ID NO: 323. In some cases, antibody E comprises a constant region comprising at least about 85%, 87%, 88%, 89%, 90%, 91%, 92%, 93%, 94%, 95%, 96%, 97%, 98%, 99%, or 100% identity to SEQ ID NO: 324. In some cases, antibody E comprises a constant region comprising at least about 85%, 87%, 88%, 89%, 90%, 91%, 92%, 93%, 94%, 95%, 96%, 97%, 98%, 99%, or 100% identity to SEQ ID NO: 325. In some cases, antibody E comprises a constant region comprising at least about 85%, 87%, 88%, 89%, 90%, 91%, 92%, 93%, 94%, 95%, 96%, 97%, 98% 99% or 100% identity to SEQ ID NO: 326. In some cases, antibody E comprises a constant region comprising at least about 85%, 87%, 88%, 89%, 90%, 91%, 92%, 93%, 94%, 95%, 96%, 97%, 98%, 99%, or 100% identity to SEQ ID NO: 327. In some cases, antibody E comprises a constant region comprising at least about 85%, 87%, 88%, 89%, 90%, 91%, 92%, 93%, 94%, 95%, 96%, 97%, 98%, 99%, or 100% identity to SEQ ID NO: 328. In some cases, antibody E comprises a constant region comprising at least about 85%, 87%, 88%, 89%, 90%, 91%, 92%, 93%, 94%, 95%, 96%, 97%, 98%, 99%, or 100% identity to SEQ ID NO: 329. In some cases, antibody E comprises a constant region comprising at least about 85%, 87%, 88%, 89%, 90%, 91%, 92%, 93%, 94%, 95%, 96%, 97%, 98%, 99%, or 100% identity to SEQ ID NO: 330. In some cases, antibody E comprises a constant region comprising at least about 85%, 87%, 88%, 89%, 90%, 91%, 92%, 93%, 94%, 95%, 96%, 97%, 98% 99% or 100% identity to SEQ ID NO: 331. In some cases, antibody E comprises a constant region comprising at least about 85%, 87%, 88%, 89%, 90%, 91%, 92%, 93%, 94%, 95%, 96%, 97%, 98%, 99%, or 100% identity to SEQ ID NO: 332. In some cases, antibody E comprises a constant region comprising at least about 85%, 87%, 88%, 89%, 90%, 91%, 92%, 93%, 94%, 95%, 96%, 97%, 98%, 99%, or 100% identity to SEQ ID NO: 333. In some cases, antibody E comprises a constant region comprising at least about 85%, 87%, 88%, 89%, 90%, 91%, 92%, 93%, 94%, 95%, 96%, 97%, 98%, 99%, or 100% identity to SEQ ID NO: 334. In some cases, antibody E comprises a constant region comprising at least about 85%, 87%, 88%, 89%, 90%, 91%, 92%, 93%, 94%, 95%, 96%, 97%, 98%, 99%, or 100% identity to SEQ ID NO: 335. In some cases, antibody E comprises a constant region comprising at least about 85%, 87%, 88%, 89%, 90%, 91%, 92%, 93%, 94%, 95%, 96%, 97%, 98% 99% or 100% identity to SEQ ID NO: 336. In some cases, antibody E comprises a constant region comprising at least about 85%, 87%, 88%, 89%, 90%, 91%, 92%, 93%, 94%, 95%, 96%, 97%, 98%, 99%, or 100% identity to SEQ ID NO: 337. In some cases, antibody E comprises a constant region comprising at least about 85%, 87%, 88%, 89%, 90%, 91%, 92%, 93%, 94%, 95%, 96%, 97%, 98%, 99%, or 100% identity to SEQ ID NO: 338. In some cases, antibody E comprises a constant region comprising at least about 85%, 87%, 88%, 89%, 90%, 91%, 92%, 93%, 94%, 95%, 96%, 97%, 98%, 99%, or 100% identity to SEQ ID NO: 339. In some cases, antibody E comprises a constant region comprising at least about 85%, 87%, 88%, 89%, 90%, 91%, 92%, 93%, 94%, 95%, 96%, 97%, 98%, 99%, or 100% identity to SEQ ID NO: 340. In some cases, antibody E comprises a constant region comprising at least about 85%, 87%, 88%, 89%, 90%, 91%, 92%, 93%, 94%, 95%, 96%, 97%, 98% 99% or 100% identity to SEQ ID NO: 341. In some cases, antibody E comprises a constant region comprising at least about 85%, 87%, 88%, 89%, 90%, 91%, 92%, 93%, 94%, 95%, 96%, 97%, 98%, 99%, or 100% identity to SEQ ID NO: 342. In some cases, antibody E comprises a constant region comprising at least about 85%, 87%, 88%, 89%, 90%, 91%, 92%, 93%, 94%, 95%, 96%, 97%, 98%, 99%, or 100% identity to SEQ ID NO: 343. In some cases, antibody E comprises a constant region comprising at least about 85%, 87%, 88%, 89%, 90%, 91%, 92%, 93%, 94%, 95%, 96%, 97%, 98%, 99%, or 100% identity to SEQ ID NO: 344. In some cases, antibody E comprises a constant region comprising at least about 85%, 87%, 88%, 89%, 90%, 91%, 92%, 93%, 94%, 95%, 96%, 97%, 98%, 99%, or 100% identity to SEQ ID NO: 345. In some cases, antibody E comprises a constant region comprising at least about 85%, 87%, 88%, 89%, 90%, 91%, 92%, 93%, 94%, 95%, 96%, 97%, 98% 99% or 100% identity to SEQ ID NO: 346. In some cases, antibody E comprises a constant region comprising at least about 85%, 87%, 88%, 89%, 90%, 91%, 92%, 93%, 94%, 95%, 96%, 97%, 98%, 99%, or 100% identity to SEQ ID NO: 347. In some cases, antibody E comprises a constant region comprising at least about 85%, 87%, 88%, 89%, 90%, 91%, 92%, 93%, 94%, 95%, 96%, 97%, 98%, 99%, or 100% identity to SEQ ID NO: 348. In some cases, antibody E comprises a constant region comprising at least about 85%, 87%, 88%, 89%, 90%, 91%, 92%, 93%, 94%, 95%, 96%, 97%, 98%, 99%, or 100% identity to SEQ ID NO: 349. In some cases, antibody E comprises a constant region comprising at least about 85%, 87%, 88%, 89%, 90%, 91%, 92%, 93%, 94%, 95%, 96%, 97%, 98%, 99%, or 100% identity to SEQ ID NO: 350. In some cases, antibody E comprises a constant region comprising at least about 85%, 87%, 88%, 89%, 90%, 91%, 92%, 93%, 94%, 95%, 96%, 97%, 98% 99% or 100% identity to SEQ ID NO: 351. In some cases, antibody E comprises a constant region comprising at least about 85%, 87%, 88%, 89%, 90%, 91%, 92%, 93%, 94%, 95%, 96%, 97%, 98%, 99%, or 100% identity to SEQ ID NO: 352. In some cases, antibody E comprises a constant region comprising at least about 85%, 87%, 88%, 89%, 90%, 91%, 92%, 93%, 94%, 95%, 96%, 97%, 98%, 99%, or 100% identity to SEQ ID NO: 353. In some cases, antibody E comprises a constant region comprising at least about 85%, 87%, 88%, 89%, 90%, 91%, 92%, 93%, 94%, 95%, 96%, 97%, 98%, 99%, or 100% identity to SEQ ID NO: 354. In some cases, antibody E comprises a constant region comprising at least about 85%, 87%, 88%, 89%, 90%, 91%, 92%, 93%, 94%, 95%, 96%, 97%, 98%, 99%, or 100% identity to SEQ ID NO: 355. In some cases, antibody E comprises a constant region comprising at least about 85%, 87%, 88%, 89%, 90%, 91%, 92%, 93%, 94%, 95%, 96%, 97%, 98% 99% or 100% identity to SEQ ID NO: 356. In some cases, antibody E comprises a constant region comprising at least about 85%, 87%, 88%, 89%, 90%, 91%, 92%, 93%, 94%, 95%, 96%, 97%, 98%, 99%, or 100% identity to SEQ ID NO: 357. In some cases, antibody E comprises a constant region comprising at least about 85%, 87%, 88%, 89%, 90%, 91%, 92%, 93%, 94%, 95%, 96%, 97%, 98%, 99%, or 100% identity to SEQ ID NO: 358. In some cases, antibody E comprises a constant region comprising at least about 85%, 87%, 88%, 89%, 90%, 91%, 92%, 93%, 94%, 95%, 96%, 97%, 98%, 99%, or 100% identity to SEQ ID NO: 359. In some cases, antibody E comprises a constant region comprising at least about 85%, 87%, 88%, 89%, 90%, 91%, 92%, 93%, 94%, 95%, 96%, 97%, 98%, 99%, or 100% identity to SEQ ID NO: 360. In some cases, antibody E comprises a constant region comprising at least about 85%, 87%, 88%, 89%, 90%, 91%, 92%, 93%, 94%, 95%, 96%, 97%, 98% 99% or 100% identity to SEQ ID NO: 361. In some cases, antibody E comprises a constant region comprising at least about 85%, 87%, 88%, 89%, 90%, 91%, 92%, 93%, 94%, 95%, 96%, 97%, 98%, 99%, or 100% identity to SEQ ID NO: 362. In some cases, antibody E comprises at least about 80%, 81%, 82%, 83%, 84%, 85%, 85%, 87%, 88%, 89%, 90%, 91%, 92%, 93%, 94%, 95%, 96%, 97%, 98%, 99%, or 100% monomeric fraction as measured by the size exclusion method described in Example 2. In some cases, antibody E is expressed from FreeStyle 293-F cells at an expression level of about or at least about 2, 3, 4, 5, 6, 7, 8, 9, 10, 11, 12, 13, 14, 15, 16, 17, 18, 19, 20, 21, 22, 23, 24, 25, 26, 27, 28, 29, 30, 31, 32, 33, 34, 35, 36, 37, 38, 39, 40, 41, 42, 43, 44, 45, 46, 47, 48, 49, 50, 51, 52, 53, 54, 55, 5, 57, 58, 59 or 60 μg/mL as determined by the method described in Example 2. In some cases, antibody E is expressed from FreeStyle 293-F cells at an expression level of between about 2 μg/mL to about 60 μg/mL. In some cases, antibody E is expressed from FreeStyle 293-F cells at an expression level of between about 10 μg/mL to about 60 μg/mL.

[1054] In some embodiments, an anti-TL1A antibody comprises antibody F. As used herein, antibody F comprises the CDRs of antibody F in Table 20. In some cases, antibody F comprises a heavy chain framework comprising SEQ ID NO: 301

(X1VQLVQSGAEVKKPGASVKVSCKAS[HCDR1]WVX2QX3PGQGLEW
X4G[HCDR2]RX5TX6TX7DTSTSTX8YX9ELSSLRSEDTAVYYCAR
[HCDR3]WGQGTTVTVSS),

wherein X1=Q or E, X2=R or K, X3=A or R, X4=M or I, X5=V or A, X6=M or I, X7=R or T, X8=V or A, and X9=M or L. In some cases, antibody F comprises a light chain framework comprising SEQ ID NO: 303 (EIVLTQSPGTLSLSPGERATLSC[LCDR 1]WYQQKPGQAPRX10X11IY[LCDR2]GIPDR FSGSGSGTDFTLTISRLEPEDFAVYYC[LCDR3]FGGGTKLEIK), wherein X10=L or P and X11=L or W. In some cases, antibody F comprises a heavy chain variable region comprising human IGHV1-46*02 framework or a modified human IGHV1-46*02 framework, wherein the modified human IGHV1-46*02 framework has less than or equal to about 1, 2, 3, 4, 5, 6, 7, 8, 9, 10, 11, 12, 13, 14, 15, 16, 17, 18, 19, or 20 amino acid substitutions in the framework. In some cases, antibody F comprises a light chain variable region comprising human IGKV3-20 framework or a modified human IGKV3-20 framework, wherein the modified human IGKV3-20 framework has less than or equal to about 1, 2, 3, 4, 5, 6, 7, 8, 9, 10, 11, 12, 13, 14, 15, 16, 17, 18, 19, or 20 amino acid substitutions in the framework. In some cases, antibody F comprises a constant region comprising reduced ADCC and/or CDC as compared to IgG1. For instance, antibody F comprises a human IgG1 Fc region comprising (a) 297A, 297Q, 297G, or 297D, (b) 279F, 279K, or 279L, (c) 228P, (d) 235A, 235E, 235G, 235Q, 235R, or 235S, (e) 237A, 237E, 237K, 237N, or 237R, (f) 234A, 234V, or 234F, (g) 233P, (h) 328A, (i) 327Q or 327T, (j) 329A, 329G, 329Y, or 329R (k) 331S, (1) 236F or 236R, (m) 238A, 238E, 238G, 238H, 238I, 238V, 238 W, or 238Y, (n) 248A, (o) 254D, 254E, 254G, 254H, 254I, 254N, 254P, 254Q, 254T, or 254V, (p) 255N, (q) 256H, 256K, 256R, or 256V, (r) 264S, (s) 265H, 265K, 265S, 265Y, or 265A, (t) 267G, 267H, 267I, or 267K, (u) 268K, (v) 269N or 269Q, (w) 270A, 270G, 270M, or 270N, (x) 271T, (y) 272N, (z) 292E, 292F, 292G, or 292I, (aa) 293S, (bb) 301 W, (cc) 304E, (dd) 311E, 311G, or 311S, (ee) 316F, (ff) 328V, (gg) 330R, (hh) 339E or 339L, (ii) 343I or 343V, (jj) 373A, 373G, or 373S, (kk) 376E, 376 W, or376Y, (11) 380D, (mm) 382D or 382P, (nn) 385P, (oo) 424H, 424M, or 424V, (pp) 434I, (qq) 438G, (rr) 439E, 439H, or 439Q, (ss) 440A, 440D, 440E, 440F, 440M, 440T, or 440V, (tt) E233P, (uu) L235E, (vv) L234A and L235A, (ww) L234A, L235A, and G237A, (xx) L234A, L235A, and P329G, (yy) L234F, L235E, and P331 S, (zz) L234A, L235E, and G237A, (aaa), L234A, L235E, G237A, and P331S (bbb) L234A, L235A, G237A, P238S, H268A, A330S, and P331S (IgG1σ, (ccc) L234A, L235A, and P329A, (ddd) G236R and L328R, (eee) G237A, (fff) F241A, (ggg) V264A, (hhh) D265A, (iii) D265A and N297A, (jjj) D265A and N297G, (kkk) D270A, (111) A330L, (mmm) P331A or P331S, or (nnn) any combination of (a)-(uu), per Kabat numbering. In some cases, antibody F comprises a constant region comprising at least about 85%, 87%, 88%, 89%, 90%, 91%, 92%, 93%, 94%, 95%, 96%, 97%, 98%, 99%, or 100% identity to SEQ ID NO: 320. In some cases, antibody F comprises a constant region comprising at least about 85%, 87%, 88%, 89%, 90%, 91%, 92%, 93%, 94%, 95%, 96%, 97%, 98%, 99%, or 100% identity to SEQ ID NO: 321. In some cases, antibody F comprises a constant region comprising at least about 85%, 87%, 88%, 89%, 90%, 91%, 92%, 93%, 94%, 95%, 96%, 97%, 98%, 99%, or 100% identity to SEQ ID NO: 322. In some cases, antibody F comprises a constant region comprising at least about 85%, 87%, 88%, 89%, 90%, 91%, 92%, 93%, 94%, 95%, 96%, 97%, 98%, 99%, or 100% identity to SEQ ID NO: 323. In some cases, antibody F comprises a constant region comprising at least about 85%, 87%, 88%, 89%, 90%, 91%, 92%, 93%, 94%, 95%, 96%, 97%, 98%, 99%, or 100% identity to SEQ ID NO: 324. In some cases, antibody F comprises a constant region comprising at least about 85%, 87%, 88%, 89%, 90%, 91%, 92%, 93%, 94%, 95%, 96%, 97%, 98%, 99%, or 100% identity to SEQ ID NO: 325. In some cases, antibody F comprises a constant region comprising at least about 85%, 87%, 88%, 89%, 90%, 91%, 92%, 93%, 94%, 95%, 96%, 97%, 98% 99% or 100% identity to SEQ ID NO: 326. In some cases, antibody F comprises a constant region comprising at least about 85%, 87%, 88%, 89%, 90%, 91%, 92%, 93%, 94%, 95%, 96%, 97%, 98%, 99%, or 100% identity to SEQ ID NO: 327. In some cases, antibody F comprises a constant region comprising at least about 85%, 87%, 88%, 89%, 90%, 91%, 92%, 93%, 94%, 95%, 96%, 97%, 98%, 99%, or 100% identity to SEQ ID NO: 328. In some cases, antibody F comprises a constant region comprising at least about 85%, 87%, 88%, 89%, 90%, 91%, 92%, 93%, 94%, 95%, 96%, 97%, 98%, 99%, or 100% identity to SEQ ID NO: 329. In some cases, antibody F comprises a constant region comprising at least about 85%, 87%, 88%, 89%, 90%, 91%, 92%, 93%, 94%, 95%, 96%, 97%, 98%, 99%, or 100% identity to SEQ ID NO: 330. In some cases, antibody F comprises a constant region comprising at least about 85%, 87%, 88%, 89%, 90%, 91%, 92%, 93%, 94%, 95%, 96%, 97%, 98% 99% or 100% identity to SEQ ID NO: 331. In some cases, antibody F comprises a constant region comprising at least about 85%, 87%, 88%, 89%, 90%, 91%, 92%, 93%, 94%, 95%, 96%, 97%, 98%, 99%, or 100% identity to SEQ ID NO: 332. In some cases, antibody F comprises a constant region comprising at least about 85%, 87%, 88%, 89%, 90%, 91%, 92%, 93%, 94%, 95%, 96%, 97%, 98%, 99%, or 100% identity to SEQ ID NO: 333. In some cases, antibody F comprises a constant region comprising at least about 85%, 87%, 88%, 89%, 90%, 91%, 92%, 93%, 94%, 95%, 96%, 97%, 98%, 99%, or 100% identity to SEQ ID NO: 334. In some cases, antibody F comprises a constant region comprising at least about 85%, 87%, 88%, 89%, 90%, 91%, 92%, 93%, 94%, 95%, 96%, 97%, 98%, 99%, or 100% identity to SEQ ID NO: 335. In some cases, antibody F comprises a constant region comprising at least about 85%, 87%, 88%, 89%, 90%, 91%, 92%, 93%, 94%, 95%, 96%, 97%, 98% 99% or 100% identity to SEQ ID NO: 336. In some cases, antibody F comprises a constant region comprising at least about 85%, 87%, 88%, 89%, 90%, 91%, 92%, 93%, 94%, 95%, 96%, 97%, 98%, 99%, or 100% identity to SEQ ID NO: 337. In some cases, antibody F comprises a constant region comprising at least about 85%, 87%, 88%, 89%, 90%, 91%, 92%, 93%, 94%, 95%, 96%, 97%, 98%, 99%, or 100% identity to SEQ ID NO: 338. In some cases, antibody F comprises a constant region comprising at least about 85%, 87%, 88%, 89%, 90%, 91%, 92%, 93%, 94%, 95%, 96%, 97%, 98%, 99%, or 100% identity to SEQ ID NO: 339. In some cases, antibody F comprises a constant region comprising at least about 85%, 87%, 88%, 89%, 90%, 91%, 92%, 93%, 94%, 95%, 96%, 97%, 98%, 99%, or 100% identity to SEQ ID NO: 340. In some cases, antibody F comprises a constant region comprising at least about 85%, 87%, 88%, 89%, 90%, 91%, 92%, 93%, 94%, 95%, 96%, 97%, 98% 99% or 100% identity to SEQ ID NO: 341. In some cases, antibody F comprises a constant region comprising at least about 85%, 87%, 88%, 89%, 90%, 91%, 92%, 93%, 94%, 95%, 96%, 97%, 98%, 99%, or 100% identity to SEQ ID NO: 342. In some cases, antibody F comprises a constant region comprising at least about 85%, 87%, 88%, 89%, 90%, 91%, 92%, 93%, 94%, 95%, 96%, 97%, 98%, 99%, or 100% identity to SEQ ID NO: 343. In some cases, antibody F comprises a constant region comprising at least about 85%, 87%, 88%, 89%, 90%, 91%, 92%, 93%, 94%, 95%, 96%, 97%, 98%, 99%, or 100% identity to SEQ ID NO: 344. In some cases, antibody F comprises a constant region comprising at least about 85%, 87%, 88%, 89%, 90%, 91%, 92%, 93%, 94%, 95%, 96%, 97%, 98%, 99%, or 100% identity to SEQ ID NO: 345. In some cases, antibody F comprises a constant region comprising at least about 85%, 87%, 88%, 89%, 90%, 91%, 92%, 93%, 94%, 95%, 96%, 97%, 98% 99% or 100% identity to SEQ ID NO: 346. In some cases, antibody F comprises a constant region comprising at least about 85%, 87%, 88%, 89%, 90%, 91%, 92%, 93%, 94%, 95%, 96%, 97%, 98%, 99%, or 100% identity to SEQ ID NO: 347. In some cases, antibody F comprises a constant region comprising at least about 85%, 87%, 88%, 89%, 90%, 91%, 92%, 93%, 94%, 95%, 96%, 97%, 98%, 99%, or 100% identity to SEQ ID NO: 348. In some cases, antibody F comprises a constant region comprising at least about 85%, 87%, 88%, 89%, 90%, 91%, 92%, 93%, 94%, 95%, 96%, 97%, 98%, 99%, or 100% identity to SEQ ID NO: 349. In some cases, antibody F comprises a constant region comprising at least about 85%, 87%, 88%, 89%, 90%, 91%, 92%, 93%, 94%, 95%, 96%, 97%, 98%, 99%, or 100% identity to SEQ ID NO: 350. In some cases, antibody F comprises a constant region comprising at least about 85%, 87%, 88%, 89%, 90%, 91%, 92%, 93%, 94%, 95%, 96%, 97%, 98% 99% or 100% identity to SEQ ID NO: 351. In some cases, antibody F comprises a constant region comprising at least about 85%, 87%, 88%, 89%, 90%, 91%, 92%, 93%, 94%, 95%, 96%, 97%, 98%, 99%, or 100% identity to SEQ ID NO: 352. In some cases, antibody F comprises a constant region comprising at least about 85%, 87%, 88%, 89%, 90%, 91%, 92%, 93%, 94%, 95%, 96%, 97%, 98%, 99%, or 100% identity to SEQ ID NO: 353. In some cases, antibody F comprises a constant region comprising at least about 85%, 87%, 88%, 89%, 90%, 91%, 92%, 93%, 94%, 95%, 96%, 97%, 98%, 99%, or 100% identity to SEQ ID NO: 354. In some cases, antibody F comprises a constant region comprising at least about 85%, 87%, 88%, 89%, 90%, 91%, 92%, 93%, 94%, 95%, 96%, 97%, 98%, 99%, or 100% identity to SEQ ID NO: 355. In some cases, antibody F comprises a constant region comprising at least about 85%, 87%, 88%, 89%, 90%, 91%, 92%, 93%, 94%, 95%, 96%, 97%, 98% 99% or 100% identity to SEQ ID NO: 356. In some cases, antibody F comprises a constant region comprising at least about 85%, 87%, 88%, 89%, 90%, 92%, 93%, 94%, 95%, 91%, 96%, 97%, 98%, 99%, or 100% identity to SEQ ID NO: 357. In some cases, antibody F comprises a constant region comprising at least about 85%, 87%, 88%, 89%, 90%, 91%, 92%, 93%, 94%, 95%, 96%, 97%, 98%, 99%, or 100% identity to SEQ ID NO: 358. In some cases, antibody F comprises a constant region comprising at least about 85%, 87%, 88%, 89%, 90%, 91%, 92%, 93%, 94%, 95%, 96%, 97%, 98%, 99%, or 100% identity to SEQ ID NO: 359. In some cases, antibody F comprises a constant region comprising at least about 85%, 87%, 88%, 89%, 90%, 91%, 92%, 93%, 94%, 95%, 96%, 97%, 98%, 99%, or 100% identity to SEQ ID NO: 360. In some cases, antibody F comprises a constant region comprising at least about 85%, 87%, 88%, 89%, 90%, 91%, 92%, 93%, 94%, 95%, 96%, 97%, 98% 99% or 100% identity to SEQ ID NO: 361. In some cases, antibody F comprises a constant region comprising at least about 85%, 87%, 88%, 89%, 90%, 91%, 92%, 93%, 94%, 95%, 96%, 97%, 98%, 99%, or 100% identity to SEQ ID NO: 362. In some cases, antibody F comprises at least about 80%, 81%, 82%, 83%, 84%, 85%, 85%, 87%, 88%, 89%, 90%, 91%, 92%, 93%, 94%, 95%, 96%, 97%, 98%, 99%, or 100% monomeric fraction as measured by the size exclusion method described in Example 2. In some cases, antibody F is expressed from FreeStyle 293-F cells at an expression level of about or at least about 2, 3, 4, 5, 6, 7, 8, 9, 10, 11, 12, 13, 14, 15, 16, 17, 18, 19, 20, 21, 22, 23, 24, 25, 26, 27, 28, 29, 30, 31, 32, 33, 34, 35, 36, 37, 38, 39, 40, 41, 42, 43, 44, 45, 46, 47, 48, 49, 50, 51, 52, 53, 54, 55, 5, 57, 58, 59 or 60 μg/mL as determined by the method described in Example 2. In some cases, antibody F is expressed from FreeStyle 293-F cells at an expression level of between about 2 μg/mL to about 60 μg/mL. In some cases, antibody F is expressed from FreeStyle 293-F cells at an expression level of between about 10 μg/mL to about 60 μg/mL.

[1055] In some embodiments, an anti-TL1A antibody comprises antibody G. As used herein, antibody G comprises the CDRs of antibody Gin Table 20. In some cases, antibody G comprises a heavy chain framework comprising SEQ ID NO: 301

(X1VQLVQSGAEVKKPGASVKVSCKAS[HCDR1]WVX2QX3PGQGLEW
X4G[HCDR2]RX5TX6TX7DTSTSTX8YX9ELSSLRSEDTAVYYCAR
[HCDR3]WGQGTTVTVSS),

wherein X1=Q or E, X2=R or K, X3=A or R, X4=M or I, X5=V or A, X6=M or I, X7=R or T, X8=V or A, and X9=M or L. In some cases, antibody G comprises a light chain framework comprising SEQ ID NO: 303 (EIVLTQSPGTLSLSPGERATLSC[LCDR 1]WYQQKPGQAPRX10X11IY[LCDR2]GIPDR FSGSGSGTDFTLTISRLEPEDFAVYYC[LCDR3]FGGGTKLEIK), wherein X10=L or P and X11=L or W. In some cases, antibody G comprises a heavy chain variable region comprising human IGHV1-46*02 framework or a modified human IGHV1-46*02 framework, wherein the modified human IGHV1-46*02 framework has less than or equal to about 1, 2, 3, 4, 5, 6, 7, 8, 9, 10, 11, 12, 13, 14, 15, 16, 17, 18, 19, or 20 amino acid substitutions in the framework. In some cases, antibody G comprises a light chain variable region comprising human IGKV3-20 framework or a modified human IGKV3-20 framework, wherein the modified human IGKV3-20 framework has less than or equal to about 1, 2, 3, 4, 5, 6, 7, 8, 9, 10, 11, 12, 13, 14, 15, 16, 17, 18, 19, or 20 amino acid substitutions in the framework. In some cases, antibody G comprises a constant region comprising reduced ADCC and/or CDC as compared to IgG1. For instance, antibody G comprises a human IgG1 Fc region comprising (a) 297A, 297Q, 297G, or 297D, (b) 279F, 279K, or 279L, (c) 228P, (d) 235A, 235E, 235G, 235Q, 235R, or 235S, (e) 237A, 237E, 237K, 237N, or 237R, (f) 234A, 234V, or 234F, (g) 233P, (h) 328A, (i) 327Q or 327T, (j) 329A, 329G, 329Y, or 329R (k) 331S, (1) 236F or 236R, (m) 238A, 238E, 238G, 238H, 238I, 238V, 238 W, or 238Y, (n) 248A, (o) 254D, 254E, 254G, 254H, 254I, 254N, 254P, 254Q, 254T, or 254V, (p) 255N, (q) 256H, 256K, 256R, or 256V, (r) 264S, (s) 265H, 265K, 265S, 265Y, or 265A, (t) 267G, 267H, 267I, or 267K, (u) 268K, (v) 269N or 269Q, (w) 270A, 270G, 270M, or 270N, (x) 271T, (y) 272N, (z) 292E, 292F, 292G, or 292I, (aa) 293S, (bb) 301 W, (cc) 304E, (dd) 311E, 311G, or 311S, (ee) 316F, (ff) 328V, (gg) 330R, (hh) 339E or 339L, (ii) 343I or 343V, (jj) 373A, 373G, or 373S, (kk) 376E, 376 W, or 376Y, (11) 380D, (mm) 382D or 382P, (nn) 385P, (oo) 424H, 424M, or 424V, (pp) 434I, (qq) 438G, (rr) 439E, 439H, or 439Q, (ss) 440A, 440D, 440E, 440F, 440M, 440T, or 440V, (tt) E233P, (uu) L235E, (vv) L234A and L235A, (ww) L234A, L235A, and G237A, (xx) L234A, L235A, and P329G, (yy) L234F, L235E, and P331 S, (zz) L234A, L235E, and G237A, (aaa), L234A, L235E, G237A, and P331S (bbb) L234A, L235A, G237A, P238S, H268A, A330S, and P331S (IgG1σ, (ccc) L234A, L235A, and P329A, (ddd) G236R and L328R, (eee) G237A, (fff) F241A, (ggg) V264A, (hhh) D265A, (iii) D265A and N297A, (jjj) D265A and N297G, (kkk) D270A, (111) A330L, (mmm) P331A or P331S, or (nnn) any combination of (a)-(uu), per Kabat numbering. In some cases, antibody G comprises a constant region comprising at least about 85%, 87%, 88%, 89%, 90%, 91%, 92%, 93%, 94%, 95%, 96%, 97%, 98%, 99%, or 100% identity to SEQ ID NO: 320. In some cases, antibody G comprises a constant region comprising at least about 85%, 87%, 88%, 89%, 90%, 91%, 92%, 93%, 94%, 95%, 96%, 97%, 98%, 99%, or 100% identity to SEQ ID NO: 321. In some cases, antibody G comprises a constant region comprising at least about 85%, 87%, 88%, 89%, 90%, 91%, 92%, 93%, 94%, 95%, 96%, 97%, 98%, 99%, or 100% identity to SEQ ID NO: 322. In some cases, antibody G comprises a constant region comprising at least about 85%, 87%, 88%, 89%, 90%, 91%, 92%, 93%, 94%, 95%, 96%, 97%, 98%, 99%, or 100% identity to SEQ ID NO: 323. In some cases, antibody G comprises a constant region comprising at least about 85%, 87%, 88%, 89%, 90%, 91%, 92%, 93%, 94%, 95%, 96%, 97%, 98%, 99%, or 100% identity to SEQ ID NO: 324. In some cases, antibody G comprises a constant region comprising at least about 85%, 87%, 88%, 89%, 90%, 91%, 92%, 93%, 94%, 95%, 96%, 97%, 98%, 99%, or 100% identity to SEQ ID NO: 325. In some cases, antibody G comprises a constant region comprising at least about 85%, 87%, 88%, 89%, 90%, 91%, 92%, 93%, 94%, 95%, 96%, 97%, 98% 99% or 100% identity to SEQ ID NO: 326. In some cases, antibody G comprises a constant region comprising at least about 85%, 87%, 88%, 89%, 90%, 91%, 92%, 93%, 94%, 95%, 96%, 97%, 98%, 99%, or 100% identity to SEQ ID NO: 327. In some cases, antibody G comprises a constant region comprising at least about 85%, 87%, 88%, 89%, 90%, 91%, 92%, 93%, 94%, 95%, 96%, 97%, 98%, 99%, or 100% identity to SEQ ID NO: 328. In some cases, antibody G comprises a constant region comprising at least about 85%, 87%, 88%, 89%, 90%, 91%, 92%, 93%, 94%, 95%, 96%, 97%, 98%, 99%, or 100% identity to SEQ ID NO: 329. In some cases, antibody G comprises a constant region comprising at least about 85%, 87%, 88%, 89%, 90%, 91%, 92%, 93%, 94%, 95%, 96%, 97%, 98%, 99%, or 100% identity to SEQ ID NO: 330. In some cases, antibody G comprises a constant region comprising at least about 85%, 87%, 88%, 89%, 90%, 91%, 92%, 93%, 94%, 95%, 96%, 97%, 98% 99% or 100% identity to SEQ ID NO: 331. In some cases, antibody G comprises a constant region comprising at least about 85%, 87%, 88%, 89%, 90%, 91%, 92%, 93%, 94%, 95%, 96%, 97%, 98%, 99%, or 100% identity to SEQ ID NO: 332. In some cases, antibody G comprises a constant region comprising at least about 85%, 87%, 88%, 89%, 90%, 91%, 92%, 93%, 94%, 95%, 96%, 97%, 98%, 99%, or 100% identity to SEQ ID NO: 333. In some cases, antibody G comprises a constant region comprising at least about 85%, 87%, 88%, 89%, 90%, 91%, 92%, 93%, 94%, 95%, 96%, 97%, 98%, 99%, or 100% identity to SEQ ID NO: 334. In some cases, antibody G comprises a constant region comprising at least about 85%, 87%, 88%, 89%, 90%, 91%, 92%, 93%, 94%, 95%, 96%, 97%, 98%, 99%, or 100% identity to SEQ ID NO: 335. In some cases, antibody G comprises a constant region comprising at least about 85%, 87%, 88%, 89%, 90%, 91%, 92%, 93%, 94%, 95%, 96%, 97%, 98% 99% or 100% identity to SEQ ID NO: 336. In some cases, antibody G comprises a constant region comprising at least about 85%, 87%, 88%, 89%, 90%, 91%, 92%, 93%, 94%, 95%, 96%, 97%, 98%, 99%, or 100% identity to SEQ ID NO: 337. In some cases, antibody G comprises a constant region comprising at least about 85%, 87%, 88%, 89%, 90%, 91%, 92%, 93%, 94%, 95%, 96%, 97%, 98%, 99%, or 100% identity to SEQ ID NO: 338. In some cases, antibody G comprises a constant region comprising at least about 85%, 87%, 88%, 89%, 90%, 91%, 92%, 93%, 94%, 95%, 96%, 97%, 98%, 99%, or 100% identity to SEQ ID NO: 339. In some cases, antibody G comprises a constant region comprising at least about 85%, 87%, 88%, 89%, 90%, 91%, 92%, 93%, 94%, 95%, 96%, 97%, 98%, 99%, or 100% identity to SEQ ID NO: 340. In some cases, antibody G comprises a constant region comprising at least about 85%, 87%, 88%, 89%, 90%, 91%, 92%, 93%, 94%, 95%, 96%, 97%, 98% 99% or 100% identity to SEQ ID NO: 341. In some cases, antibody G comprises a constant region comprising at least about 85%, 87%, 88%, 89%, 90%, 91%, 92%, 93%, 94%, 95%, 96%, 97%, 98%, 99%, or 100% identity to SEQ ID NO: 342. In some cases, antibody G comprises a constant region comprising at least about 85%, 87%, 88%, 89%, 90%, 91%, 92%, 93%, 94%, 95%, 96%, 97%, 98%, 99%, or 100% identity to SEQ ID NO: 343. In some cases, antibody G comprises a constant region comprising at least about 85%, 87%, 88%, 89%, 90%, 91%, 92%, 93%, 94%, 95%, 96%, 97%, 98%, 99%, or 100% identity to SEQ ID NO: 344. In some cases, antibody G comprises a constant region comprising at least about 85%, 87%, 88%, 89%, 90%, 91%, 92%, 93%, 94%, 95%, 96%, 97%, 98%, 99%, or 100% identity to SEQ ID NO: 345. In some cases, antibody G comprises a constant region comprising at least about 85%, 87%, 88%, 89%, 90%, 91%, 92%, 93%, 94%, 95%, 96%, 97%, 98% 99% or 100% identity to SEQ ID NO: 346. In some cases, antibody G comprises a constant region comprising at least about 85%, 87%, 88%, 89%, 90%, 91%, 92%, 93%, 94%, 95%, 96%, 97%, 98%, 99%, or 100% identity to SEQ ID NO: 347. In some cases, antibody G comprises a constant region comprising at least about 85%, 87%, 88%, 89%, 90%, 91%, 92%, 93%, 94%, 95%, 96%, 97%, 98%, 99%, or 100% identity to SEQ ID NO: 348. In some cases, antibody G comprises a constant region comprising at least about 85%, 87%, 88%, 89%, 90%, 91%, 92%, 93%, 94%, 95%, 96%, 97%, 98%, 99%, or 100% identity to SEQ ID NO: 349. In some cases, antibody G comprises a constant region comprising at least about 85%, 87%, 88%, 89%, 90%, 91%, 92%, 93%, 94%, 95%, 96%, 97%, 98%, 99%, or 100% identity to SEQ ID NO: 350. In some cases, antibody G comprises a constant region comprising at least about 85%, 87%, 88%, 89%, 90%, 91%, 92%, 93%, 94%, 95%, 96%, 97%, 98% 99% or 100% identity to SEQ ID NO: 351. In some cases, antibody G comprises a constant region comprising at least about 85%, 87%, 88%, 89%, 90%, 91%, 92%, 93%, 94%, 95%, 96%, 97%, 98%, 99%, or 100% identity to SEQ ID NO: 352. In some cases, antibody G comprises a constant region comprising at least about 85%, 87%, 88%, 89%, 90%, 91%, 92%, 93%, 94%, 95%, 96%, 97%, 98%, 99%, or 100% identity to SEQ ID NO: 353. In some cases, antibody G comprises a constant region comprising at least about 85%, 87%, 88%, 89%, 90%, 91%, 92%, 93%, 94%, 95%, 96%, 97%, 98%, 99%, or 100% identity to SEQ ID NO: 354. In some cases, antibody G comprises a constant region comprising at least about 85%, 87%, 88%, 89%, 90%, 91%, 92%, 93%, 94%, 95%, 96%, 97%, 98%, 99%, or 100% identity to SEQ ID NO: 355. In some cases, antibody G comprises a constant region comprising at least about 85%, 87%, 88%, 89%, 90%, 91%, 92%, 93%, 94%, 95%, 96%, 97%, 98% 99% or 100% identity to SEQ ID NO: 356. In some cases, antibody G comprises a constant region comprising at least about 85%, 87%, 88%, 89%, 90%, 91%, 92%, 93%, 94%, 95%, 96%, 97%, 98%, 99%, or 100% identity to SEQ ID NO: 357. In some cases, antibody G comprises a constant region comprising at least about 85%, 87%, 88%, 89%, 90%, 91%, 92%, 93%, 94%, 95%, 96%, 97%, 98%, 99%, or 100% identity to SEQ ID NO: 358. In some cases, antibody G comprises a constant region comprising at least about 85%, 87%, 88%, 89%, 90%, 91%, 92%, 93%, 94%, 95%, 96%, 97%, 98%, 99%, or 100% identity to SEQ ID NO: 359. In some cases, antibody G comprises a constant region comprising at least about 85%, 87%, 88%, 89%, 90%, 91%, 92%, 93%, 94%, 95%, 96%, 97%, 98%, 99%, or 100% identity to SEQ ID NO: 360. In some cases, antibody G comprises a constant region comprising at least about 85%, 87%, 88%, 89%, 90%, 91%, 92%, 93%, 94%, 95%, 96%, 97%, 98% 99% or 100% identity to SEQ ID NO: 361. In some cases, antibody G comprises a constant region comprising at least about 85%, 87%, 88%, 89%, 90%, 91%, 92%, 93%, 94%, 95%, 96%, 97%, 98%, 99%, or 100% identity to SEQ ID NO: 362. In some cases, antibody G comprises at least about 80%, 81%, 82%, 83%, 84%, 85%, 85%, 87%, 88%, 89%, 90%, 91%, 92%, 93%, 94%, 95%, 96%, 97%, 98%, 99%, or 100% monomeric fraction as measured by the size exclusion method described in Example 2. In some cases, antibody G is expressed from FreeStyle 293-F cells at an expression level of about or at least about 2, 3, 4, 5, 6, 7, 8, 9, 10, 11, 12, 13, 14, 15, 16, 17, 18, 19, 20, 21, 22, 23, 24, 25, 26, 27, 28, 29, 30, 31, 32, 33, 34, 35, 36, 37, 38, 39, 40, 41, 42, 43, 44, 45, 46, 47, 48, 49, 50, 51, 52, 53, 54, 55, 5, 57, 58, 59 or 60 μg/mL as determined by the method described in Example 2. In some cases, antibody G is expressed from FreeStyle 293-F cells at an expression level of between about 2 μg/mL to about 60 μg/mL. In some cases, antibody G is expressed from FreeStyle 293-F cells at an expression level of between about 10 μg/mL to about 60 μg/mL.

[1056] In some embodiments, an anti-TL1A antibody comprises antibody H. As used herein, antibody H comprises the CDRs of antibody H in Table 20. In some cases, antibody H comprises a heavy chain framework comprising SEQ ID NO: 301

(X1VQLVQSGAEVKKPGASVKVSCKAS[HCDR1]WVX2QX3PGQGLEW
X4G[HCDR2]RX5TX6TX7DTSTSTX8YX9ELSSLRSEDTAVYYCAR
[HCDR3]WGQGTTVTVSS),

wherein X1=Q or E, X2=R or K, X3=A or R, X4=M or I, X5=V or A, X6=M or I, X7=R or T, X8=V or A, and X9=M or L. In some cases, antibody H comprises a light chain framework comprising SEQ ID NO: 303 (EIVLTQSPGTLSLSPGERATLSC[LCDR 1]WYQQKPGQAPRX10X11IY[LCDR2]GIPDR FSGSGSGTDFTLTISRLEPEDFAVYYC[LCDR3]FGGGTKLEIK), wherein X10=L or P and X11=L or W. In some cases, antibody H comprises a heavy chain variable region comprising human IGHV1-46*02 framework or a modified human IGHV1-46*02 framework, wherein the modified human IGHV1-46*02 framework has less than or equal to about 1, 2, 3, 4, 5, 6, 7, 8, 9, 10, 11, 12, 13, 14, 15, 16, 17, 18, 19, or 20 amino acid substitutions in the framework. In some cases, antibody H comprises a light chain variable region comprising human IGKV3-20 framework or a modified human IGKV3-20 framework, wherein the modified human IGKV3-20 framework has less than or equal to about 1, 2, 3, 4, 5, 6, 7, 8, 9, 10, 11, 12, 13, 14, 15, 16, 17, 18, 19, or 20 amino acid substitutions in the framework. In some cases, antibody H comprises a constant region comprising reduced ADCC and/or CDC as compared to IgG1. For instance, antibody H comprises a human IgG1 Fc region comprising (a) 297A, 297Q, 297G, or 297D, (b) 279F, 279K, or 279L, (c) 228P, (d) 235A, 235E, 235G, 235Q, 235R, or 235S, (e) 237A, 237E, 237K, 237N, or 237R, (f) 234A, 234V, or 234F, (g) 233P, (h) 328A, (i) 327Q or 327T, (j) 329A, 329G, 329Y, or 329R (k) 331S, (1) 236F or 236R, (m) 238A, 238E, 238G, 238H, 238I, 238V, 238 W, or 238Y, (n) 248A, (o) 254D, 254E, 254G, 254H, 254I, 254N, 254P, 254Q, 254T, or 254V, (p) 255N, (q) 256H, 256K, 256R, or 256V, (r) 264S, (s) 265H, 265K, 265S, 265Y, or 265A, (t) 267G, 267H, 267I, or 267K, (u) 268K, (v) 269N or 269Q, (w) 270A, 270G, 270M, or 270N, (x) 271T, (y) 272N, (z) 292E, 292F, 292G, or 292I, (aa) 293S, (bb) 301 W, (cc) 304E, (dd) 311E, 311G, or 311S, (ee) 316F, (ff) 328V, (gg) 330R, (hh) 339E or 339L, (ii) 343I or 343V, (jj) 373A, 373G, or 373S, (kk) 376E, 376 W, or 376Y, (11) 380D, (mm) 382D or 382P, (nn) 385P, (oo) 424H, 424M, or 424V, (pp) 434I, (qq) 438G, (rr) 439E, 439H, or 439Q, (ss) 440A, 440D, 440E, 440F, 440M, 440T, or 440V, (tt) E233P, (uu) L235E, (vv) L234A and L235A, (ww) L234A, L235A, and G237A, (xx) L234A, L235A, and P329G, (yy) L234F, L235E, and P331 S, (zz) L234A, L235E, and G237A, (aaa), L234A, L235E, G237A, and P331 S (bbb) L234A, L235A, G237A, P238S, H268A, A330S, and P331S (IgG1σ, (ccc) L234A, L235A, and P329A, (ddd) G236R and L328R, (eee) G237A, (fff) F241A, (ggg) V264A, (hhh) D265A, (iii) D265A and N297A, (jjj) D265A and N297G, (kkk) D270A, (111) A330L, (mmm) P331A or P331S, or (nnn) any combination of (a)-(uu), per Kabat numbering. In some cases, antibody H comprises a constant region comprising at least about 85%, 87%, 88%, 89%, 90%, 91%, 92%, 93%, 94%, 95%, 96%, 97%, 98%, 99%, or 100% identity to SEQ ID NO: 320. In some cases, antibody H comprises a constant region comprising at least about 85%, 87%, 88%, 89%, 90%, 91%, 92%, 93%, 94%, 95%, 96%, 97%, 98%, 99%, or 100% identity to SEQ ID NO: 321. In some cases, antibody H comprises a constant region comprising at least about 85%, 87%, 88%, 89%, 90%, 91%, 92%, 93%, 94%, 95%, 96%, 97%, 98%, 99%, or 100% identity to SEQ ID NO: 322. In some cases, antibody H comprises a constant region comprising at least about 85%, 87%, 88%, 89%, 90%, 91%, 92%, 93%, 94%, 95%, 96%, 97%, 98%, 99%, or 100% identity to SEQ ID NO: 323. In some cases, antibody H comprises a constant region comprising at least about 85%, 87%, 88%, 89%, 90%, 91%, 92%, 93%, 94%, 95%, 96%, 97%, 98%, 99%, or 100% identity to SEQ ID NO: 324. In some cases, antibody H comprises a constant region comprising at least about 85%, 87%, 88%, 89%, 90%, 91%, 92%, 93%, 94%, 95%, 96%, 97%, 98%, 99%, or 100% identity to SEQ ID NO: 325. In some cases, antibody H comprises a constant region comprising at least about 85%, 87%, 88%, 89%, 90%, 91%, 92%, 93%, 94%, 95%, 96%, 97%, 98% 99% or 100% identity to SEQ ID NO: 326. In some cases, antibody H comprises a constant region comprising at least about 85%, 87%, 88%, 89%, 90%, 91%, 92%, 93%, 94%, 95%, 96%, 97%, 98%, 99%, or 100% identity to SEQ ID NO: 327. In some cases, antibody H comprises a constant region comprising at least about 85%, 87%, 88%, 89%, 90%, 91%, 92%, 93%, 94%, 95%, 96%, 97%, 98%, 99%, or 100% identity to SEQ ID NO: 328. In some cases, antibody H comprises a constant region comprising at least about 85%, 87%, 88%, 89%, 90%, 91%, 92%, 93%, 94%, 95%, 96%, 97%, 98%, 99%, or 100% identity to SEQ ID NO: 329. In some cases, antibody H comprises a constant region comprising at least about 85%, 87%, 88%, 89%, 90%, 91%, 92%, 93%, 94%, 95%, 96%, 97%, 98%, 99%, or 100% identity to SEQ ID NO: 330. In some cases, antibody H comprises a constant region comprising at least about 85%, 87%, 88%, 89%, 90%, 91%, 92%, 93%, 94%, 95%, 96%, 97%, 98% 99% or 100% identity to SEQ ID NO: 331. In some cases, antibody H comprises a constant region comprising at least about 85%, 87%, 88%, 89%, 90%, 91%, 92%, 93%, 94%, 95%, 96%, 97%, 98%, 99%, or 100% identity to SEQ ID NO: 332. In some cases, antibody H comprises a constant region comprising at least about 85%, 87%, 88%, 89%, 90%, 91%, 92%, 93%, 94%, 95%, 96%, 97%, 98%, 99%, or 100% identity to SEQ ID NO: 333. In some cases, antibody H comprises a constant region comprising at least about 85%, 87%, 88%, 89%, 90%, 91%, 92%, 93%, 94%, 95%, 96%, 97%, 98%, 99%, or 100% identity to SEQ ID NO: 334. In some cases, antibody H comprises a constant region comprising at least about 85%, 87%, 88%, 89%, 90%, 91%, 92%, 93%, 94%, 95%, 96%, 97%, 98%, 99%, or 100% identity to SEQ ID NO: 335. In some cases, antibody H comprises a constant region comprising at least about 85%, 87%, 88%, 89%, 90%, 91%, 92%, 93%, 94%, 95%, 96%, 97%, 98% 99% or 100% identity to SEQ ID NO: 336. In some cases, antibody H comprises a constant region comprising at least about 85%, 87%, 88%, 89%, 90%, 91%, 92%, 93%, 94%, 95%, 96%, 97%, 98%, 99%, or 100% identity to SEQ ID NO: 337. In some cases, antibody H comprises a constant region comprising at least about 85%, 87%, 88%, 89%, 90%, 91%, 92%, 93%, 94%, 95%, 96%, 97%, 98%, 99%, or 100% identity to SEQ ID NO: 338. In some cases, antibody H comprises a constant region comprising at least about 85%, 87%, 88%, 89%, 90%, 91%, 92%, 93%, 94%, 95%, 96%, 97%, 98%, 99%, or 100% identity to SEQ ID NO: 339. In some cases, antibody H comprises a constant region comprising at least about 85%, 87%, 88%, 89%, 90%, 91%, 92%, 93%, 94%, 95%, 96%, 97%, 98%, 99%, or 100% identity to SEQ ID NO: 340. In some cases, antibody H comprises a constant region comprising at least about 85%, 87%, 88%, 89%, 90%, 91%, 92%, 93%, 94%, 95%, 96%, 97%, 98% 99% or 100% identity to SEQ ID NO: 341. In some cases, antibody H comprises a constant region comprising at least about 85%, 87%, 88%, 89%, 90%, 91%, 92%, 93%, 94%, 95%, 96%, 97%, 98%, 99%, or 100% identity to SEQ ID NO: 342. In some cases, antibody H comprises a constant region comprising at least about 85%, 87%, 88%, 89%, 90%, 91%, 92%, 93%, 94%, 95%, 96%, 97%, 98%, 99%, or 100% identity to SEQ ID NO: 343. In some cases, antibody H comprises a constant region comprising at least about 85%, 87%, 88%, 89%, 90%, 91%, 92%, 93%, 94%, 95%, 96%, 97%, 98%, 99%, or 100% identity to SEQ ID NO: 344. In some cases, antibody H comprises a constant region comprising at least about 85%, 87%, 88%, 89%, 90%, 91%, 92%, 93%, 94%, 95%, 96%, 97%, 98%, 99%, or 100% identity to SEQ ID NO: 345. In some cases, antibody H comprises a constant region comprising at least about 85%, 87%, 88%, 89%, 90%, 91%, 92%, 93%, 94%, 95%, 96%, 97%, 98% 99% or 100% identity to SEQ ID NO: 346. In some cases, antibody H comprises a constant region comprising at least about 85%, 87%, 88%, 89%, 90%, 91%, 92%, 93%, 94%, 95%, 96%, 97%, 98%, 99%, or 100% identity to SEQ ID NO: 347. In some cases, antibody H comprises a constant region comprising at least about 85%, 87%, 88%, 89%, 90%, 91%, 92%, 93%, 94%, 95%, 96%, 97%, 98%, 99%, or 100% identity to SEQ ID NO: 348. In some cases, antibody H comprises a constant region comprising at least about 85%, 87%, 88%, 89%, 90%, 91%, 92%, 93%, 94%, 95%, 96%, 97%, 98%, 99%, or 100% identity to SEQ ID NO: 349. In some cases, antibody H comprises a constant region comprising at least about 85%, 87%, 88%, 89%, 90%, 91%, 92%, 93%, 94%, 95%, 96%, 97%, 98%, 99%, or 100% identity to SEQ ID NO: 350. In some cases, antibody H comprises a constant region comprising at least about 85%, 87%, 88%, 89%, 90%, 91%, 92%, 93%, 94%, 95%, 96%, 97%, 98% 99% or 100% identity to SEQ ID NO: 351. In some cases, antibody H comprises a constant region comprising at least about 85%, 87%, 88%, 89%, 90%, 91%, 92%, 93%, 94%, 95%, 96%, 97%, 98%, 99%, or 100% identity to SEQ ID NO: 352. In some cases, antibody H comprises a constant region comprising at least about 85%, 87%, 88%, 89%, 90%, 91%, 92%, 93%, 94%, 95%, 96%, 97%, 98%, 99%, or 100% identity to SEQ ID NO: 353. In some cases, antibody H comprises a constant region comprising at least about 85%, 87%, 88%, 89%, 90%, 91%, 92%, 93%, 94%, 95%, 96%, 97%, 98%, 99%, or 100% identity to SEQ ID NO: 354. In some cases, antibody H comprises a constant region comprising at least about 85%, 87%, 88%, 89%, 90%, 91%, 92%, 93%, 94%, 95%, 96%, 97%, 98%, 99%, or 100% identity to SEQ ID NO: 355. In some cases, antibody H comprises a constant region comprising at least about 85%, 87%, 88%, 89%, 90%, 91%, 92%, 93%, 94%, 95%, 96%, 97%, 98% 99% or 100% identity to SEQ ID NO: 356. In some cases, antibody H comprises a constant region comprising at least about 85%, 87%, 88%, 89%, 90%, 91%, 92%, 93%, 94%, 95%, 96%, 97%, 98%, 99%, or 100% identity to SEQ ID NO: 357. In some cases, antibody H comprises a constant region comprising at least about 85%, 87%, 88%, 89%, 90%, 91%, 92%, 93%, 94%, 95%, 96%, 97%, 98%, 99%, or 100% identity to SEQ ID NO: 358. In some cases, antibody H comprises a constant region comprising at least about 85%, 87%, 88%, 89%, 90%, 91%, 92%, 93%, 94%, 95%, 96%, 97%, 98%, 99%, or 100% identity to SEQ ID NO: 359. In some cases, antibody H comprises a constant region comprising at least about 85%, 87%, 88%, 89%, 90%, 91%, 92%, 93%, 94%, 95%, 96%, 97%, 98%, 99%, or 100% identity to SEQ ID NO: 360. In some cases, antibody H comprises a constant region comprising at least about 85%, 87%, 88%, 89%, 90%, 91%, 92%, 93%, 94%, 95%, 96%, 97%, 98% 99% or 100% identity to SEQ ID NO: 361. In some cases, antibody H comprises a constant region comprising at least about 85%, 87%, 88%, 89%, 90%, 91%, 92%, 93%, 94%, 95%, 96%, 97%, 98%, 99%, or 100% identity to SEQ ID NO: 362. In some cases, antibody H comprises at least about 80%, 81%, 82%, 83%, 84%, 85%, 85%, 87%, 88%, 89%, 90%, 91%, 92%, 93%, 94%, 95%, 96%, 97%, 98%, 99%, or 100% monomeric fraction as measured by the size exclusion method described in Example 2. In some cases, antibody H is expressed from FreeStyle 293-F cells at an expression level of about or at least about 2, 3, 4, 5, 6, 7, 8, 9, 10, 11, 12, 13, 14, 15, 16, 17, 18, 19, 20, 21, 22, 23, 24, 25, 26, 27, 28, 29, 30, 31, 32, 33, 34, 35, 36, 37, 38, 39, 40, 41, 42, 43, 44, 45, 46, 47, 48, 49, 50, 51, 52, 53, 54, 55, 5, 57, 58, 59 or 60 μg/mL as determined by the method described in Example 2. In some cases, antibody H is expressed from FreeStyle 293-F cells at an expression level of between about 2 μg/mL to about 60 μg/mL. In some cases, antibody H is expressed from FreeStyle 293-F cells at an expression level of between about 10 μg/mL to about 60 μg/mL.

[1057] In some embodiments, an anti-TL1A antibody comprises antibody I. As used herein, antibody I comprises the CDRs of antibody I in Table 20. In some cases, antibody I comprises a heavy chain framework comprising SEQ ID NO: 301

(X1VQLVQSGAEVKKPGASVKVSCKAS[HCDR1]WVX2QX3PGQGLEW
X4G[HCDR2]RX5TX6TX7DTSTSTX8YX9ELSSLRSEDTAVYYCAR
[HCDR3]WGQGTTVTVSS),

wherein X1=Q or E, X2=R or K, X3=A or R, X4=M or I, X5=V or A, X6=M or I, X7=R or T, X8=V or A, and X9=M or L. In some cases, antibody I comprises a light chain framework comprising SEQ ID NO: 303 (EIVLTQSPGTLSLSPGERATLSC[LCDR 1]WYQQKPGQAPRX10X11IY[LCDR2]GIPDR FSGSGSGTDFTLTISRLEPEDFAVYYC[LCDR3]FGGGTKLEIK), wherein X10=L or P and X11=L or W. In some cases, antibody I comprises a heavy chain variable region comprising human IGHV1-46*02 framework or a modified human IGHV1-46*02 framework, wherein the modified human IGHV1-46*02 framework has less than or equal to about 1, 2, 3, 4, 5, 6, 7, 8, 9, 10, 11, 12, 13, 14, 15, 16, 17, 18, 19, or 20 amino acid substitutions in the framework. In some cases, antibody I comprises a light chain variable region comprising human IGKV3-20 framework or a modified human IGKV3-20 framework, wherein the modified human IGKV3-20 framework has less than or equal to about 1, 2, 3, 4, 5, 6, 7, 8, 9, 10, 11, 12, 13, 14, 15, 16, 17, 18, 19, or 20 amino acid substitutions in the framework. In some cases, antibody I comprises a constant region comprising reduced ADCC and/or CDC as compared to IgG1. For instance, antibody I comprises a human IgG1 Fc region comprising (a) 297A, 297Q, 297G, or 297D, (b) 279F, 279K, or 279L, (c) 228P, (d) 235A, 235E, 235G, 235Q, 235R, or 235S, (e) 237A, 237E, 237K, 237N, or 237R, (f) 234A, 234V, or 234F, (g) 233P, (h) 328A, (i) 327Q or 327T, (j) 329A, 329G, 329Y, or 329R (k) 331S, (1) 236F or 236R, (m) 238A, 238E, 238G, 238H, 238I, 238V, 238 W, or 238Y, (n) 248A, (o) 254D, 254E, 254G, 254H, 254I, 254N, 254P, 254Q, 254T, or 254V, (p) 255N, (q) 256H, 256K, 256R, or 256V, (r) 264S, (s) 265H, 265K, 265S, 265Y, or 265A, (t) 267G, 267H, 267I, or 267K, (u) 268K, (v) 269N or 269Q, (w) 270A, 270G, 270M, or 270N, (x) 271T, (y) 272N, (z) 292E, 292F, 292G, or 292I, (aa) 293S, (bb) 301 W, (cc) 304E, (dd) 311E, 311G, or 311S, (ee) 316F, (ff) 328V, (gg) 330R, (hh) 339E or 339L, (ii) 343I or 343V, (jj) 373A, 373G, or 373S, (kk) 376E, 376 W, or 376Y, (11) 380D, (mm) 382D or 382P, (nn) 385P, (oo) 424H, 424M, or 424V, (pp) 434I, (qq) 438G, (rr) 439E, 439H, or 439Q, (ss) 440A, 440D, 440E, 440F, 440M, 440T, or 440V, (tt) E233P, (uu) L235E, (vv) L234A and L235A, (ww) L234A, L235A, and G237A, (xx) L234A, L235A, and P329G, (yy) L234F, L235E, and P331 S, (zz) L234A, L235E, and G237A, (aaa), L234A, L235E, G237A, and P331S (bbb) L234A, L235A, G237A, P238S, H268A, A330S, and P331S (IgG1σ, (ccc) L234A, L235A, and P329A, (ddd) G236R and L328R, (eee) G237A, (fff) F241A, (ggg) V264A, (hhh) D265A, (iii) D265A and N297A, (jjj) D265A and N297G, (kkk) D270A, (111) A330L, (mmm) P331A or P331S, or (nnn) any combination of (a)-(uu), per Kabat numbering. In some cases, antibody I comprises a constant region comprising at least about 85%, 87%, 88%, 89%, 90%, 91%, 92%, 93%, 94%, 95%, 96%, 97%, 98%, 99%, or 100% identity to SEQ ID NO: 320. In some cases, antibody I comprises a constant region comprising at least about 85%, 87%, 88%, 89%, 90%, 91%, 92%, 93%, 94%, 95%, 96%, 97%, 98%, 99%, or 100% identity to SEQ ID NO: 321. In some cases, antibody I comprises a constant region comprising at least about 85%, 87%, 88%, 89%, 90%, 91%, 92%, 93%, 94%, 95%, 96%, 97%, 98%, 99%, or 100% identity to SEQ ID NO: 322. In some cases, antibody I comprises a constant region comprising at least about 85%, 87%, 88%, 89%, 90%, 91%, 92%, 93%, 94%, 95%, 96%, 97%, 98%, 99%, or 100% identity to SEQ ID NO: 323. In some cases, antibody I comprises a constant region comprising at least about 85%, 87%, 88%, 89%, 90%, 91%, 92%, 93%, 94%, 95%, 96%, 97%, 98%, 99%, or 100% identity to SEQ ID NO: 324. In some cases, antibody I comprises a constant region comprising at least about 85%, 87%, 88%, 89%, 90%, 91%, 92%, 93%, 94%, 95%, 96%, 97%, 98%, 99%, or 100% identity to SEQ ID NO: 325. In some cases, antibody I comprises a constant region comprising at least about 85%, 87%, 88%, 89%, 90%, 91%, 92%, 93%, 94%, 95%, 96%, 97%, 98%, 99%, or 100% identity to SEQ ID NO: 326. In some cases, antibody I comprises a constant region comprising at least about 85%, 87%, 88%, 89%, 90%, 91%, 92%, 93%, 94%, 95%, 96%, 97%, 98%, 99%, or 100% identity to SEQ ID NO: 327. In some cases, antibody I comprises a constant region comprising at least about 85%, 87%, 88%, 89%, 90%, 91%, 92%, 93%, 94%, 95%, 96%, 97%, 98%, 99%, or 100% identity to SEQ ID NO: 328. In some cases, antibody I comprises a constant region comprising at least about 85%, 87%, 88%, 89%, 90%, 91%, 92%, 93%, 94%, 95%, 96%, 97%, 98%, 99%, or 100% identity to SEQ ID NO: 329. In some cases, antibody I comprises a constant region comprising at least about 85%, 87%, 88%, 89%, 90%, 91%, 92%, 93%, 94%, 95%, 96%, 97%, 98%, 99%, or 100% identity to SEQ ID NO: 330. In some cases, antibody I comprises a constant region comprising at least about 85%, 87%, 88%, 89%, 90%, 91%, 92%, 93%, 94%, 95%, 96%, 97%, 98%, 99%, or 100% identity to SEQ ID NO: 331. In some cases, antibody I comprises a constant region comprising at least about 85%, 87%, 88%, 89%, 90%, 91%, 92%, 93%, 94%, 95%, 96%, 97%, 98%, 99%, or 100% identity to SEQ ID NO: 332. In some cases, antibody I comprises a constant region comprising at least about 85%, 87%, 88%, 89%, 90%, 91%, 92%, 93%, 94%, 95%, 96%, 97%, 98%, 99%, or 100% identity to SEQ ID NO: 333. In some cases, antibody I comprises a constant region comprising at least about 85%, 87%, 88%, 89%, 90%, 91%, 92%, 93%, 94%, 95%, 96%, 97%, 98%, 99%, or 100% identity to SEQ ID NO: 334. In some cases, antibody I comprises a constant region comprising at least about 85%, 87%, 88%, 89%, 90%, 91%, 92%, 93%, 94%, 95%, 96%, 97%, 98%, 99%, or 100% identity to SEQ ID NO: 335. In some cases, antibody I comprises a constant region comprising at least about 85%, 87%, 88%, 89%, 90%, 91%, 92%, 93%, 94%, 95%, 96%, 97%, 98%, 99%, or 100% identity to SEQ ID NO: 336. In some cases, antibody I comprises a constant region comprising at least about 85%, 87%, 88%, 89%, 90%, 91%, 92%, 93%, 94%, 95%, 96%, 97%, 98%, 99%, or 100% identity to SEQ ID NO: 337. In some cases, antibody I comprises a constant region comprising at least about 85%, 87%, 88%, 89%, 90%, 91%, 92%, 93%, 94%, 95%, 96%, 97%, 98%, 99%, or 100% identity to SEQ ID NO: 338. In some cases, antibody I comprises a constant region comprising at least about 85%, 87%, 88%, 89%, 90%, 91%, 92%, 93%, 94%, 95%, 96%, 97%, 98%, 99%, or 100% identity to SEQ ID NO: 339. In some cases, antibody I comprises a constant region comprising at least about 85%, 87%, 88%, 89%, 90%, 91%, 92%, 93%, 94%, 95%, 96%, 97%, 98%, 99%, or 100% identity to SEQ ID NO: 340. In some cases, antibody I comprises a constant region comprising at least about 85%, 87%, 88%, 89%, 90%, 91%, 92%, 93%, 94%, 95%, 96%, 97%, 98%, 99%, or 100% identity to SEQ ID NO: 341. In some cases, antibody I comprises a constant region comprising at least about 85%, 87%, 88%, 89%, 90%, 91%, 92%, 93%, 94%, 95%, 96%, 97%, 98%, 99%, or 100% identity to SEQ ID NO: 342. In some cases, antibody I comprises a constant region comprising at least about 85%, 87%, 88%, 89%, 90%, 91%, 92%, 93%, 94%, 95%, 96%, 97%, 98%, 99%, or 100% identity to SEQ ID NO: 343. In some cases, antibody I comprises a constant region comprising at least about 85%, 87%, 88%, 89%, 90%, 91%, 92%, 93%, 94%, 95%, 96%, 97%, 98%, 99%, or 100% identity to SEQ ID NO: 344. In some cases, antibody I comprises a constant region comprising at least about 85%, 87%, 88%, 89%, 90%, 91%, 92%, 93%, 94%, 95%, 96%, 97%, 98%, 99%, or 100% identity to SEQ ID NO: 345. In some cases, antibody I comprises a constant region comprising at least about 85%, 87%, 88%, 89%, 90%, 91%, 92%, 93%, 94%, 95%, 96%, 97%, 98%, 99%, or 100% identity to SEQ ID NO: 346. In some cases, antibody I comprises a constant region comprising at least about 85%, 87%, 88%, 89%, 90%, 91%, 92%, 93%, 94%, 95%, 96%, 97%, 98%, 99%, or 100% identity to SEQ ID NO: 347. In some cases, antibody I comprises a constant region comprising at least about 85%, 87%, 88%, 89%, 90%, 91%, 92%, 93%, 94%, 95%, 96%, 97%, 98%, 99%, or 100% identity to SEQ ID NO: 348. In some cases, antibody I comprises a constant region comprising at least about 85%, 87%, 88%, 89%, 90%, 91%, 92%, 93%, 94%, 95%, 96%, 97%, 98%, 99%, or 100% identity to SEQ ID NO: 349. In some cases, antibody I comprises a constant region comprising at least about 85%, 87%, 88%, 89%, 90%, 91%, 92%, 93%, 94%, 95%, 96%, 97%, 98%, 99%, or 100% identity to SEQ ID NO: 350. In some cases, antibody I comprises a constant region comprising at least about 85%, 87%, 88%, 89%, 90%, 91%, 92%, 93%, 94%, 95%, 96%, 97%, 98%, 99%, or 100% identity to SEQ ID NO: 351. In some cases, antibody I comprises a constant region comprising at least about 85%, 87%, 88%, 89%, 90%, 91%, 92%, 93%, 94%, 95%, 96%, 97%, 98%, 99%, or 100% identity to SEQ ID NO: 352. In some cases, antibody I comprises a constant region comprising at least about 85%, 87%, 88%, 89%, 90%, 91%, 92%, 93%, 94%, 95%, 96%, 97%, 98%, 99%, or 100% identity to SEQ ID NO: 353. In some cases, antibody I comprises a constant region comprising at least about 85%, 87%, 88%, 89%, 90%, 91%, 92%, 93%, 94%, 95%, 96%, 97%, 98%, 99%, or 100% identity to SEQ ID NO: 354. In some cases, antibody I comprises a constant region comprising at least about 85%, 87%, 88%, 89%, 90%, 91%, 92%, 93%, 94%, 95%, 96%, 97%, 98%, 99%, or 100% identity to SEQ ID NO: 355. In some cases, antibody I comprises a constant region comprising at least about 85%, 87%, 88%, 89%, 90%, 91%, 92%, 93%, 94%, 95%, 96%, 97%, 98%, 99%, or 100% identity to SEQ ID NO: 356. In some cases, antibody I comprises a constant region comprising at least about 85%, 87%, 88%, 89%, 90%, 91%, 92%, 93%, 94%, 95%, 96%, 97%, 98%, 99%, or 100% identity to SEQ ID NO: 357. In some cases, antibody I comprises a constant region comprising at least about 85%, 87%, 88%, 89%, 90%, 91%, 92%, 93%, 94%, 95%, 96%, 97%, 98%, 99%, or 100% identity to SEQ ID NO: 358. In some cases, antibody I comprises a constant region comprising at least about 85%, 87%, 88%, 89%, 90%, 91%, 92%, 93%, 94%, 95%, 96%, 97%, 98%, 99%, or 100% identity to SEQ ID NO: 359. In some cases, antibody I comprises a constant region comprising at least about 85%, 87%, 88%, 89%, 90%, 91%, 92%, 93%, 94%, 95%, 96%, 97%, 98%, 99%, or 100% identity to SEQ ID NO: 360. In some cases, antibody I comprises a constant region comprising at least about 85%, 87%, 88%, 89%, 90%, 91%, 92%, 93%, 94%, 95%, 96%, 97%, 98%, 99%, or 100% identity to SEQ ID NO: 361. In some cases, antibody I comprises a constant region comprising at least about 85%, 87%, 88%, 89%, 90%, 91%, 92%, 93%, 94%, 95%, 96%, 97%, 98%, 99%, or 100% identity to SEQ ID NO: 362. In some cases, antibody I comprises at least about 80%, 81%, 82%, 83%, 84%, 85%, 85%, 87%, 88%, 89%, 90%, 91%, 92%, 93%, 94%, 95%, 96%, 97%, 98%, 99%, or 100% monomeric fraction as measured by the size exclusion method described in Example 2. In some cases, antibody I is expressed from FreeStyle 293-F cells at an expression level of about or at least about 2, 3, 4, 5, 6, 7, 8, 9, 10, 11, 12, 13, 14, 15, 16, 17, 18, 19, 20, 21, 22, 23, 24, 25, 26, 27, 28, 29, 30, 31, 32, 33, 34, 35, 36, 37, 38, 39, 40, 41, 42, 43, 44, 45, 46, 47, 48, 49, 50, 51, 52, 53, 54, 55, 5, 57, 58, 59 or 60 μg/mL as determined by the method described in Example 2. In some cases, antibody I is expressed from FreeStyle 293-F cells at an expression level of between about 2 μg/mL to about 60 μg/mL. In some cases, antibody I is expressed from FreeStyle 293-F cells at an expression level of between about 10 μg/mL to about 60 μg/mL.

[1058] In some embodiments, an anti-TL1A antibody comprises antibody A2. As used herein, antibody A2 comprises the CDRs of antibody A2 in Table 20. In some cases, antibody A2 comprises a heavy chain framework comprising SEQ ID NO: 302 (X1VQLVQSGAEVKKPGASVKVSCKAS[HCDR1]WVX2QX3PGQGLEWX4G[HCDR2]RX5TX6TX7DTSTSTX8YX9ELSSLRSEDTAVYYC[HCDR3]WGQGTTVTVSS), wherein X1=Q or E, X2=R or K, X3=A or R, X4=M or I, X5=V or A, X6=M or I, X7=R or T, X8=V or A, and X9=M or L. In some cases, antibody A2 comprises a light chain framework comprising SEQ ID NO: 303 (EIVLTQSPGTLSLSPGERATLSC[LCDR 1]WYQQKPGQAPRX10X11IY[LCDR2]GIPDR FSGSGSGTDFTLTISRLEPEDFAVYYC[LCDR3]FGGGTKLEIK), wherein X10=L or P and X11=L or W. In some cases, antibody A2 comprises a heavy chain variable region comprising human IGHV1-46*02 framework or a modified human IGHV1-46*02 framework, wherein the modified human IGHV1-46*02 framework has less than or equal to about 1, 2, 3, 4, 5, 6, 7, 8, 9, 10, 11, 12, 13, 14, 15, 16, 17, 18, 19, or 20 amino acid substitutions in the framework. In some cases, antibody A2 comprises a light chain variable region comprising human IGKV3-20 framework or a modified human IGKV3-20 framework, wherein the modified human IGKV3-20 framework has less than or equal to about 1, 2, 3, 4, 5, 6, 7, 8, 9, 10, 11, 12, 13, 14, 15, 16, 17, 18, 19, or 20 amino acid substitutions in the framework. In some cases, antibody A2 comprises a constant region comprising reduced ADCC and/or CDC as compared to IgG1. For instance, antibody A2 comprises a human IgG1 Fc region comprising (a) 297A, 297Q, 297G, or 297D, (b) 279F, 279K, or 279L, (c) 228P, (d) 235A, 235E, 235G, 235Q, 235R, or 235S, (e) 237A, 237E, 237K, 237N, or 237R, (f) 234A, 234V, or 234F, (g) 233P, (h) 328A, (i) 327Q or 327T, (j) 329A, 329G, 329Y, or 329R (k) 331S, (1) 236F or 236R, (m) 238A, 238E, 238G, 238H, 238I, 238V, 238 W, or 238Y, (n) 248A, (o) 254D, 254E, 254G, 254H, 254I, 254N, 254P, 254Q, 254T, or 254V, (p) 255N, (q) 256H, 256K, 256R, or 256V, (r) 264S, (s) 265H, 265K, 265S, 265Y, or 265A, (t) 267G, 267H, 267I, or 267K, (u) 268K, (v) 269N or 269Q, (w) 270A, 270G, 270M, or 270N, (x) 271T, (y) 272N, (z) 292E, 292F, 292G, or 292I, (aa) 293S, (bb) 301 W, (cc) 304E, (dd) 311E, 311G, or 311S, (ee) 316F, (ff) 328V, (gg) 330R, (hh) 339E or 339L, (ii) 343I or 343V, (jj) 373A, 373G, or 373S, (kk) 376E, 376 W, or 376Y, (11) 380D, (mm) 382D or 382P, (nn) 385P, (oo) 424H, 424M, or 424V, (pp) 434I, (qq) 438G, (rr) 439E, 439H, or 439Q, (ss) 440A, 440D, 440E, 440F, 440M, 440T, or 440V, (tt) E233P, (uu) L235E, (vv) L234A and L235A, (ww) L234A, L235A, and G237A, (xx) L234A, L235A, and P329G, (yy) L234F, L235E, and P331 S, (zz) L234A, L235E, and G237A, (aaa), L234A, L235E, G237A, and P331S (bbb) L234A, L235A, G237A, P238 S, H268A, A330 S, and P331S (IgG1σ, (ccc) L234A, L235A, and P329A, (ddd) G236R and L328R, (eee) G237A, (fff) F241A, (ggg) V264A, (hhh) D265A, (iii) D265A and N297A, (jjj) D265A and N297G, (kkk) D270A, (111) A330L, (mmm) P331A or P331S, or (nnn) any combination of (a)-(uu), per Kabat numbering. In some cases, antibody A2 comprises a constant region comprising at least about 85%, 87%, 88%, 89%, 90%, 91%, 92%, 93%, 94%, 95%, 96%, 97%, 98%, 99%, or 100% identity to SEQ ID NO: 320. In some cases, antibody A2 comprises a constant region comprising at least about 85%, 87%, 88%, 89%, 90%, 91%, 92%, 93%, 94%, 95%, 96%, 97%, 98%, 99%, or 100% identity to SEQ ID NO: 321. In some cases, antibody A2 comprises a constant region comprising at least about 85%, 87%, 88%, 89%, 90%, 91%, 92%, 93%, 94%, 95%, 96%, 97%, 98%, 99%, or 100% identity to SEQ ID NO: 322. In some cases, antibody A2 comprises a constant region comprising at least about 85%, 87%, 88%, 89%, 90%, 91%, 92%, 93%, 94%, 95%, 96%, 97%, 98%, 99%, or 100% identity to SEQ ID NO: 323. In some cases, antibody A2 comprises a constant region comprising at least about 85%, 87%, 88%, 89%, 90%, 91%, 92%, 93%, 94%, 95%, 96%, 97%, 98%, 99%, or 100% identity to SEQ ID NO: 324. In some cases, antibody A2 comprises a constant region comprising at least about 85%, 87%, 88%, 89%, 90%, 91%, 92%, 93%, 94%, 95%, 96%, 97%, 98%, 99%, or 100% identity to SEQ ID NO: 325. In some cases, antibody A2 comprises a constant region comprising at least about 85%, 87%, 88%, 89%, 90%, 91%, 92%, 93%, 94%, 95%, 96%, 97%, 98%, 99%, or 100% identity to SEQ ID NO: 326. In some cases, antibody A2 comprises a constant region comprising at least about 85%, 87%, 88%, 89%, 90%, 91%, 92%, 93%, 94%, 95%, 96%, 97%, 98%, 99%, or 100% identity to SEQ ID NO: 327. In some cases, antibody A2 comprises a constant region comprising at least about 85%, 87%, 88%, 89%, 90%, 91%, 92%, 93%, 94%, 95%, 96%, 97%, 98%, 99%, or 100% identity to SEQ ID NO: 328. In some cases, antibody A2 comprises a constant region comprising at least about 85%, 87%, 88%, 89%, 90%, 91%, 92%, 93%, 94%, 95%, 96%, 97%, 98%, 99%, or 100% identity to SEQ ID NO: 329. In some cases, antibody A2 comprises a constant region comprising at least about 85%, 87%, 88%, 89%, 90%, 91%, 92%, 93%, 94%, 95%, 96%, 97%, 98%, 99%, or 100% identity to SEQ ID NO: 330. In some cases, antibody A2 comprises a constant region comprising at least about 85%, 87%, 88%, 89%, 90%, 91%, 92%, 93%, 94%, 95%, 96%, 97%, 98%, 99%, or 100% identity to SEQ ID NO: 331. In some cases, antibody A2 comprises a constant region comprising at least about 85%, 87%, 88%, 89%, 90%, 91%, 92%, 93%, 94%, 95%, 96%, 97%, 98%, 99%, or 100% identity to SEQ ID NO: 332. In some cases, antibody A2 comprises a constant region comprising at least about 85%, 87%, 88%, 89%, 90%, 91%, 92%, 93%, 94%, 95%, 96%, 97%, 98%, 99%, or 100% identity to SEQ ID NO: 333. In some cases, antibody A2 comprises a constant region comprising at least about 85%, 87%, 88%, 89%, 90%, 91%, 92%, 93%, 94%, 95%, 96%, 97%, 98%, 99%, or 100% identity to SEQ ID NO: 334. In some cases, antibody A2 comprises a constant region comprising at least about 85%, 87%, 88%, 89%, 90%, 91%, 92%, 93%, 94%, 95%, 96%, 97%, 98%, 99%, or 100% identity to SEQ ID NO: 335. In some cases, antibody A2 comprises a constant region comprising at least about 85%, 87%, 88%, 89%, 90%, 91%, 92%, 93%, 94%, 95%, 96%, 97%, 98%, 99%, or 100% identity to SEQ ID NO: 336. In some cases, antibody A2 comprises a constant region comprising at least about 85%, 87%, 88%, 89%, 90%, 91%, 92%, 93%, 94%, 95%, 96%, 97%, 98%, 99%, or 100% identity to SEQ ID NO: 337. In some cases, antibody A2 comprises a constant region comprising at least about 85%, 87%, 88%, 89%, 90%, 91%, 92%, 93%, 94%, 95%, 96%, 97%, 98%, 99%, or 100% identity to SEQ ID NO: 338. In some cases, antibody A2 comprises a constant region comprising at least about 85%, 87%, 88%, 89%, 90%, 91%, 92%, 93%, 94%, 95%, 96%, 97%, 98%, 99%, or 100% identity to SEQ ID NO: 339. In some cases, antibody A2 comprises a constant region comprising at least about 85%, 87%, 88%, 89%, 90%, 91%, 92%, 93%, 94%, 95%, 96%, 97%, 98%, 99%, or 100% identity to SEQ ID NO: 340. In some cases, antibody A2 comprises a constant region comprising at least about 85%, 87%, 88%, 89%, 90%, 91%, 92%, 93%, 94%, 95%, 96%, 97%, 98%, 99%, or 100% identity to SEQ ID NO: 341. In some cases, antibody A2 comprises a constant region comprising at least about 85%, 87%, 88%, 89%, 90%, 91%, 92%, 93%, 94%, 95%, 96%, 97%, 98%, 99%, or 100% identity to SEQ ID NO: 342. In some cases, antibody A2 comprises a constant region comprising at least about 85%, 87%, 88%, 89%, 90%, 91%, 92%, 93%, 94%, 95%, 96%, 97%, 98%, 99%, or 100% identity to SEQ ID NO: 343. In some cases, antibody A2 comprises a constant region comprising at least about 85%, 87%, 88%, 89%, 90%, 91%, 92%, 93%, 94%, 95%, 96%, 97%, 98%, 99%, or 100% identity to SEQ ID NO: 344. In some cases, antibody A2 comprises a constant region comprising at least about 85%, 87%, 88%, 89%, 90%, 91%, 92%, 93%, 94%, 95%, 96%, 97%, 98%, 99%, or 100% identity to SEQ ID NO: 345. In some cases, antibody A2 comprises a constant region comprising at least about 85%, 87%, 88%, 89%, 90%, 91%, 92%, 93%, 94%, 95%, 96%, 97%, 98%, 99%, or 100% identity to SEQ ID NO: 346. In some cases, antibody A2 comprises a constant region comprising at least about 85%, 87%, 88%, 89%, 90%, 91%, 92%, 93%, 94%, 95%, 96%, 97%, 98%, 99%, or 100% identity to SEQ ID NO: 347. In some cases, antibody A2 comprises a constant region comprising at least about 85%, 87%, 88%, 89%, 90%, 91%, 92%, 93%, 94%, 95%, 96%, 97%, 98%, 99%, or 100% identity to SEQ ID NO: 348. In some cases, antibody A2 comprises a constant region comprising at least about 85%, 87%, 88%, 89%, 90%, 91%, 92%, 93%, 94%, 95%, 96%, 97%, 98%, 99%, or 100% identity to SEQ ID NO: 349. In some cases, antibody A2 comprises a constant region comprising at least about 85%, 87%, 88%, 89%, 90%, 91%, 92%, 93%, 94%, 95%, 96%, 97%, 98%, 99%, or 100% identity to SEQ ID NO: 350. In some cases, antibody A2 comprises a constant region comprising at least about 85%, 87%, 88%, 89%, 90%, 91%, 92%, 93%, 94%, 95%, 96%, 97%, 98%, 99%, or 100% identity to SEQ ID NO: 351. In some cases, antibody A2 comprises a constant region comprising at least about 85%, 87%, 88%, 89%, 90%, 91%, 92%, 93%, 94%, 95%, 96%, 97%, 98%, 99%, or 100% identity to SEQ ID NO: 352. In some cases, antibody A2 comprises a constant region comprising at least about 85%, 87%, 88%, 89%, 90%, 91%, 92%, 93%, 94%, 95%, 96%, 97%, 98%, 99%, or 100% identity to SEQ ID NO: 353. In some cases, antibody A2 comprises a constant region comprising at least about 85%, 87%, 88%, 89%, 90%, 91%, 92%, 93%, 94%, 95%, 96%, 97%, 98%, 99%, or 100% identity to SEQ ID NO: 354. In some cases, antibody A2 comprises a constant region comprising at least about 85%, 87%, 88%, 89%, 90%, 91%, 92%, 93%, 94%, 95%, 96%, 97%, 98%, 99%, or 100% identity to SEQ ID NO: 355. In some cases, antibody A2 comprises a constant region comprising at least about 85%, 87%, 88%, 89%, 90%, 91%, 92%, 93%, 94%, 95%, 96%, 97%, 98%, 99%, or 100% identity to SEQ ID NO: 356. In some cases, antibody A2 comprises a constant region comprising at least about 85%, 87%, 88%, 89%, 90%, 91%, 92%, 93%, 94%, 95%, 96%, 97%, 98%, 99%, or 100% identity to SEQ ID NO: 357. In some cases, antibody A2 comprises a constant region comprising at least about 85%, 87%, 88%, 89%, 90%, 91%, 92%, 93%, 94%, 95%, 96%, 97%, 98%, 99%, or 100% identity to SEQ ID NO: 358. In some cases, antibody A2 comprises a constant region comprising at least about 85%, 87%, 88%, 89%, 90%, 91%, 92%, 93%, 94%, 95%, 96%, 97%, 98%, 99%, or 100% identity to SEQ ID NO: 359. In some cases, antibody A2 comprises a constant region comprising at least about 85%, 87%, 88%, 89%, 90%, 91%, 92%, 93%, 94%, 95%, 96%, 97%, 98%, 99%, or 100% identity to SEQ ID NO: 360. In some cases, antibody A2 comprises a constant region comprising at least about 85%, 87%, 88%, 89%, 90%, 91%, 92%, 93%, 94%, 95%, 96%, 97%, 98%, 99%, or 100% identity to SEQ ID NO: 361. In some cases, antibody A2 comprises a constant region comprising at least about 85%, 87%, 88%, 89%, 90%, 91%, 92%, 93%, 94%, 95%, 96%, 97%, 98%, 99%, or 100% identity to SEQ ID NO: 362. In some cases, antibody A2 comprises at least about 80%, 81%, 82%, 83%, 84%, 85%, 85%, 87%, 88%, 89%, 90%, 91%, 92%, 93%, 94%, 95%, 96%, 97%, 98%, 99%, or 100% monomeric fraction as measured by the size exclusion method described in Example 2. In some cases, antibody A2 is expressed from FreeStyle 293-F cells at an expression level of about or at least about 2, 3, 4, 5, 6, 7, 8, 9, 10, 11, 12, 13, 14, 15, 16, 17, 18, 19, 20, 21, 22, 23, 24, 25, 26, 27, 28, 29, 30, 31, 32, 33, 34, 35, 36, 37, 38, 39, 40, 41, 42, 43, 44, 45, 46, 47, 48, 49, 50, 51, 52, 53, 54, 55, 5, 57, 58, 59 or 60 μg/mL as determined by the method described in Example 2. In some cases, antibody A2 is expressed from FreeStyle 293-F cells at an expression level of between about 2 μg/mL to about 60 μg/mL. In some cases, antibody A2 is expressed from FreeStyle 293-F cells at an expression level of between about 10 μg/mL to about 60 μg/mL.

[1059] In some embodiments, an anti-TL1A antibody comprises antibody B2. As used herein, antibody B2 comprises the CDRs of antibody B2 in Table 20. In some cases, antibody B2 comprises a heavy chain framework comprising SEQ ID NO: 302 (X1VQLVQSGAEVKKPGASVKVSCKAS[HCDR 1]WVX2QX3PGQGLEWX4G[HCDR2]RX5TX6TX7DTSTSTX8YX9ELSSLRSEDTAVYYC[HCDR3]WGQGTTVTVSS), wherein X1=Q or E, X2=R or K, X3=A or R, X4=M or I, X5=V or A, X6=M or I, X7=R or T, X8=V or A, and X9=M or L. In some cases, antibody B2 comprises a light chain framework comprising SEQ ID NO: 303 (EIVLTQSPGTLSLSPGERATLSC[LCDR 1]WYQQKPGQAPRX10X11IY[LCDR2]GIPDR FSGSGSGTDFTLTISRLEPEDFAVYYC[LCDR3]FGGGTKLEIK), wherein X10=L or P and X11=L or W. In some cases, antibody B2 comprises a heavy chain variable region comprising human IGHV1-46*02 framework or a modified human IGHV1-46*02 framework, wherein the modified human IGHV1-46*02 framework has less than or equal to about 1, 2, 3, 4, 5, 6, 7, 8, 9, 10, 11, 12, 13, 14, 15, 16, 17, 18, 19, or 20 amino acid substitutions in the framework. In some cases, antibody B2 comprises a light chain variable region comprising human IGKV3-20 framework or a modified human IGKV3-20 framework, wherein the modified human IGKV3-20 framework has less than or equal to about 1, 2, 3, 4, 5, 6, 7, 8, 9, 10, 11, 12, 13, 14, 15, 16, 17, 18, 19, or 20 amino acid substitutions in the framework. In some cases, antibody B2 comprises a constant region comprising reduced ADCC and/or CDC as compared to IgG1. For instance, antibody B2 comprises a human IgG1 Fc region comprising (a) 297A, 297Q, 297G, or 297D, (b) 279F, 279K, or 279L, (c) 228P, (d) 235A, 235E, 235G, 235Q, 235R, or 235S, (e) 237A, 237E, 237K, 237N, or 237R, (f) 234A, 234V, or 234F, (g) 233P, (h) 328A, (i) 327Q or 327T, (j) 329A, 329 G, 329Y, or 329R (k) 331S, (1) 236F or 236R, (m) 238A, 238E, 238G, 238H, 238I, 238V, 238 W, or 238Y, (n) 248A, (o) 254D, 254E, 254G, 254H, 254I, 254N, 254P, 254Q, 254T, or 254V, (p) 255N, (q) 256H, 256K, 256R, or 256V, (r) 264S, (s) 265H, 265K, 265S, 265Y, or 265A, (t) 267G, 267H, 267I, or 267K, (u) 268K, (v) 269N or 269Q, (w) 270A, 270G, 270M, or 270N, (x) 271T, (y) 272N, (z) 292E, 292F, 292G, or 292I, (aa) 293S, (bb) 301 W, (cc) 304E, (dd) 311E, 311G, or 311S, (ee) 316F, (ff) 328V, (gg) 330R, (hh) 339E or 339L, (ii) 343I or 343V, (j j) 373A, 373G, or 373S, (kk) 376E, 376 W, or 376Y, (11) 380D, (mm) 382D or 382P, (nn) 385P, (oo) 424H, 424M, or 424V, (pp) 434I, (qq) 438G, (rr) 439E, 439H, or 439Q, (ss) 440A, 440D, 440E, 440F, 440M, 440T, or 440V, (tt) E233P, (uu) L235E, (vv) L234A and L235A, (ww) L234A, L235A, and G237A, (xx) L234A, L235A, and P329G, (yy) L234F, L235E, and P331 S, (zz) L234A, L235E, and G237A, (aaa), L234A, L235E, G237A, and P331S (bbb) L234A, L235A, G237A, P238S, H268A, A330S, and P331S (IgG1σ, (ccc) L234A, L235A, and P329A, (ddd) G236R and L328R, (eee) G237A, (fff) F241A, (ggg) V264A, (hhh) D265A, (iii) D265A and N297A, (jjj) D265A and N297G, (kkk) D270A, (111) A330L, (mmm) P331A or P331S, or (nnn) any combination of (a)-(uu), per Kabat numbering. In some cases, antibody B2 comprises a constant region comprising at least about 85%, 87%, 88%, 89%, 90%, 91%, 92%, 93%, 94%, 95%, 96%, 97%, 98%, 99%, or 100% identity to SEQ ID NO: 320. In some cases, antibody B2 comprises a constant region comprising at least about 85%, 87%, 88%, 89%, 90%, 91%, 92%, 93%, 94%, 95%, 96%, 97%, 98%, 99%, or 100% identity to SEQ ID NO: 321. In some cases, antibody B2 comprises a constant region comprising at least about 85%, 87%, 88%, 89%, 90%, 91%, 92%, 93%, 94%, 95%, 96%, 97%, 98%, 99%, or 100% identity to SEQ ID NO: 322. In some cases, antibody B2 comprises a constant region comprising at least about 85%, 87%, 88%, 89%, 90%, 91%, 92%, 93%, 94%, 95%, 96%, 97%, 98%, 99%, or 100% identity to SEQ ID NO: 323. In some cases, antibody B2 comprises a constant region comprising at least about 85%, 87%, 88%, 89%, 90%, 91%, 92%, 93%, 94%, 95%, 96%, 97%, 98%, 99%, or 100% identity to SEQ ID NO: 324. In some cases, antibody B2 comprises a constant region comprising at least about 85%, 87%, 88%, 89%, 90%, 91%, 92%, 93%, 94%, 95%, 96%, 97%, 98%, 99%, or 100% identity to SEQ ID NO: 325. In some cases, antibody B2 comprises a constant region comprising at least about 85%, 87%, 88%, 89%, 90%, 91%, 92%, 93%, 94%, 95%, 96%, 97%, 98%, 99%, or 100% identity to SEQ ID NO: 326. In some cases, antibody B2 comprises a constant region comprising at least about 85%, 87%, 88%, 89%, 90%, 91%, 92%, 93%, 94%, 95%, 96%, 97%, 98%, 99%, or 100% identity to SEQ ID NO: 327. In some cases, antibody B2 comprises a constant region comprising at least about 85%, 87%, 88%, 89%, 90%, 91%, 92%, 93%, 94%, 95%, 96%, 97%, 98%, 99%, or 100% identity to SEQ ID NO: 328. In some cases, antibody B2 comprises a constant region comprising at least about 85%, 87%, 88%, 89%, 90%, 91%, 92%, 93%, 94%, 95%, 96%, 97%, 98%, 99%, or 100% identity to SEQ ID NO: 329. In some cases, antibody B2 comprises a constant region comprising at least about 85%, 87%, 88%, 89%, 90%, 91%, 92%, 93%, 94%, 95%, 96%, 97%, 98%, 99%, or 100% identity to SEQ ID NO: 330. In some cases, antibody B2 comprises a constant region comprising at least about 85%, 87%, 88%, 89%, 90%, 91%, 92%, 93%, 94%, 95%, 96%, 97%, 98%, 99%, or 100% identity to SEQ ID NO: 331. In some cases, antibody B2 comprises a constant region comprising at least about 85%, 87%, 88%, 89%, 90%, 91%, 92%, 93%, 94%, 95%, 96%, 97%, 98%, 99%, or 100% identity to SEQ ID NO: 332. In some cases, antibody B2 comprises a constant region comprising at least about 85%, 87%, 88%, 89%, 90%, 91%, 92%, 93%, 94%, 95%, 96%, 97%, 98%, 99%, or 100% identity to SEQ ID NO: 333. In some cases, antibody B2 comprises a constant region comprising at least about 85%, 87%, 88%, 89%, 90%, 91%, 92%, 93%, 94%, 95%, 96%, 97%, 98%, 99%, or 100% identity to SEQ ID NO: 334. In some cases, antibody B2 comprises a constant region comprising at least about 85%, 87%, 88%, 89%, 90%, 91%, 92%, 93%, 94%, 95%, 96%, 97%, 98%, 99%, or 100% identity to SEQ ID NO: 335. In some cases, antibody B2 comprises a constant region comprising at least about 85%, 87%, 88%, 89%, 90%, 91%, 92%, 93%, 94%, 95%, 96%, 97%, 98%, 99%, or 100% identity to SEQ ID NO: 336. In some cases, antibody B2 comprises a constant region comprising at least about 85%, 87%, 88%, 89%, 90%, 91%, 92%, 93%, 94%, 95%, 96%, 97%, 98%, 99%, or 100% identity to SEQ ID NO: 337. In some cases, antibody B2 comprises a constant region comprising at least about 85%, 87%, 88%, 89%, 90%, 91%, 92%, 93%, 94%, 95%, 96%, 97%, 98%, 99%, or 100% identity to SEQ ID NO: 338. In some cases, antibody B2 comprises a constant region comprising at least about 85%, 87%, 88%, 89%, 90%, 91%, 92%, 93%, 94%, 95%, 96%, 97%, 98%, 99%, or 100% identity to SEQ ID NO: 339. In some cases, antibody B2 comprises a constant region comprising at least about 85%, 87%, 88%, 89%, 90%, 91%, 92%, 93%, 94%, 95%, 96%, 97%, 98%, 99%, or 100% identity to SEQ ID NO: 340. In some cases, antibody B2 comprises a constant region comprising at least about 85%, 87%, 88%, 89%, 90%, 91%, 92%, 93%, 94%, 95%, 96%, 97%, 98%, 99%, or 100% identity to SEQ ID NO: 341. In some cases, antibody B2 comprises a constant region comprising at least about 85%, 87%, 88%, 89%, 90%, 91%, 92%, 93%, 94%, 95%, 96%, 97%, 98%, 99%, or 100% identity to SEQ ID NO: 342. In some cases, antibody B2 comprises a constant region comprising at least about 85%, 87%, 88%, 89%, 90%, 91%, 92%, 93%, 94%, 95%, 96%, 97%, 98%, 99%, or 100% identity to SEQ ID NO: 343. In some cases, antibody B2 comprises a constant region comprising at least about 85%, 87%, 88%, 89%, 90%, 91%, 92%, 93%, 94%, 95%, 96%, 97%, 98%, 99%, or 100% identity to SEQ ID NO: 344. In some cases, antibody B2 comprises a constant region comprising at least about 85%, 87%, 88%, 89%, 90%, 91%, 92%, 93%, 94%, 95%, 96%, 97%, 98%, 99%, or 100% identity to SEQ ID NO: 345. In some cases, antibody B2 comprises a constant region comprising at least about 85%, 87%, 88%, 89%, 90%, 91%, 92%, 93%, 94%, 95%, 96%, 97%, 98%, 99%, or 100% identity to SEQ ID NO: 346. In some cases, antibody B2 comprises a constant region comprising at least about 85%, 87%, 88%, 89%, 90%, 91%, 92%, 93%, 94%, 95%, 96%, 97%, 98%, 99%, or 100% identity to SEQ ID NO: 347. In some cases, antibody B2 comprises a constant region comprising at least about 85%, 87%, 88%, 89%, 90%, 91%, 92%, 93%, 94%, 95%, 96%, 97%, 98%, 99%, or 100% identity to SEQ ID NO: 348. In some cases, antibody B2 comprises a constant region comprising at least about 85%, 87%, 88%, 89%, 90%, 91%, 92%, 93%, 94%, 95%, 96%, 97%, 98%, 99%, or 100% identity to SEQ ID NO: 349. In some cases, antibody B2 comprises a constant region comprising at least about 85%, 87%, 88%, 89%, 90%, 91%, 92%, 93%, 94%, 95%, 96%, 97%, 98%, 99%, or 100% identity to SEQ ID NO: 350. In some cases, antibody B2 comprises a constant region comprising at least about 85%, 87%, 88%, 89%, 90%, 91%, 92%, 93%, 94%, 95%, 96%, 97%, 98%, 99%, or 100% identity to SEQ ID NO: 351. In some cases, antibody B2 comprises a constant region comprising at least about 85%, 87%, 88%, 89%, 90%, 91%, 92%, 93%, 94%, 95%, 96%, 97%, 98%, 99%, or 100% identity to SEQ ID NO: 352. In some cases, antibody B2 comprises a constant region comprising at least about 85%, 87%, 88%, 89%, 90%, 91%, 92%, 93%, 94%, 95%, 96%, 97%, 98%, 99%, or 100% identity to SEQ ID NO: 353. In some cases, antibody B2 comprisesa constant region comprising at least about 85%, 87%, 88%, 89%, 90%, 91%, 92%, 93%, 94%, 95%, 96%, 97%, 98%, 99%, or 100% identity to SEQ ID NO: 354. In some cases, antibody B2 comprises a constant region comprising at least about 85%, 87%, 88%, 89%, 90%, 91%, 92%, 93%, 94%, 95%, 96%, 97%, 98%, 99%, or 100% identity to SEQ ID NO: 355. In some cases, antibody B2 comprises a constant region comprising at least about 85%, 87%, 88%, 89%, 90%, 91%, 92%, 93%, 94%, 95%, 96%, 97%, 98%, 99%, or 100% identity to SEQ ID NO: 356. In some cases, antibody B2 comprises a constant region comprising at least about 85%, 87%, 88%, 89%, 90%, 91%, 92%, 93%, 94%, 95%, 96%, 97%, 98%, 99%, or 100% identity to SEQ ID NO: 357. In some cases, antibody B2 comprises a constant region comprising at least about 85%, 87%, 88%, 89%, 90%, 91%, 92%, 93%, 94%, 95%, 96%, 97%, 98%, 99%, or 100% identity to SEQ ID NO: 358. In some cases, antibody B2 comprises a constant region comprising at least about 85%, 87%, 88%, 89%, 90%, 91%, 92%, 93%, 94%, 95%, 96%, 97%, 98%, 99%, or 100% identity to SEQ ID NO: 359. In some cases, antibody B2 comprises a constant region comprising at least about 85%, 87%, 88%, 89%, 90%, 91%, 92%, 93%, 94%, 95%, 96%, 97%, 98%, 99%, or 100% identity to SEQ ID NO: 360. In some cases, antibody B2 comprises a constant region comprising at least about 85%, 87%, 88%, 89%, 90%, 91%, 92%, 93%, 94%, 95%, 96%, 97%, 98%, 99%, or 100% identity to SEQ ID NO: 361. In some cases, antibody B2 comprises a constant region comprising at least about 85%, 87%, 88%, 89%, 90%, 91%, 92%, 93%, 94%, 95%, 96%, 97%, 98%, 99%, or 100% identity to SEQ ID NO: 362. In some cases, antibody B2 comprises at least about 80%, 81%, 82%, 83%, 84%, 85%, 85%, 87%, 88%, 89%, 90%, 91%, 92%, 93%, 94%, 95%, 96%, 97%, 98%, 99%, or 100% monomeric fraction as measured by the size exclusion method described in Example 2. In some cases, antibody B2 is expressed from FreeStyle 293-F cells at an expression level of about or at least about 2, 3, 4, 5, 6, 7, 8, 9, 10, 11, 12, 13, 14, 15, 16, 17, 18, 19, 20, 21, 22, 23, 24, 25, 26, 27, 28, 29, 30, 31, 32, 33, 34, 35, 36, 37, 38, 39, 40, 41, 42, 43, 44, 45, 46, 47, 48, 49, 50, 51, 52, 53, 54, 55, 5, 57, 58, 59 or 60 μg/mL as determined by the method described in Example 2. In some cases, antibody B2 is expressed from FreeStyle 293-F cells at an expression level of between about 2 μg/mL to about 60 μg/mL. In some cases, antibody B2 is expressed from FreeStyle 293-F cells at an expression level of between about 10 μg/mL to about 60 μg/mL.

[1060] In some embodiments, an anti-TL1A antibody comprises antibody C2. As used herein, antibody C2 comprises the CDRs of antibody C2 in Table 20. In some cases, antibody C2 comprises a heavy chain framework comprising SEQ ID NO: 302 (X1VQLVQSGAEVKKPGASVKVSCKAS[HCDR 1]WVX2QX3PGQGLEWX4G[HCDR2]RX5TX6TX7DTSTSTX8YX9ELSSLRSEDTAVYYC[HCDR3]WGQGTTVTVSS), wherein X1=Q or E, X2=R or K, X3=A or R, X4=M or I, X5=V or A, X6=M or I, X7=R or T, X8=V or A, and X9=M or L. In some cases, antibody C2 comprises a light chain framework comprising SEQ ID NO: 303 (EIVLTQSPGTLSLSPGERATLSC[LCDR 1]WYQQKPGQAPRX10X11IY[LCDR2]GIPDR FSGSGSGTDFTLTISRLEPEDFAVYYC[LCDR3]FGGGTKLEIK), wherein X10=L or P and X11=L or W. In some cases, antibody C2 comprises a heavy chain variable region comprising human IGHV1-46*02 framework or a modified human IGHV1-46*02 framework, wherein the modified human IGHV1-46*02 framework has less than or equal to about 1, 2, 3, 4, 5, 6, 7, 8, 9, 10, 11, 12, 13, 14, 15, 16, 17, 18, 19, or 20 amino acid substitutions in the framework. In some cases, antibody C2 comprises a light chain variable region comprising human IGKV3-20 framework or a modified human IGKV3-20 framework, wherein the modified human IGKV3-20 framework has less than or equal to about 1, 2, 3, 4, 5, 6, 7, 8, 9, 10, 11, 12, 13, 14, 15, 16, 17, 18, 19, or 20 amino acid substitutions in the framework. In some cases, antibody C2 comprises a constant region comprising reduced ADCC and/or CDC as compared to IgG1. For instance, antibody C2 comprises a human IgG1 Fc region comprising (a) 297A, 297Q, 297G, or 297D, (b) 279F, 279K, or 279L, (c) 228P, (d) 235A, 235E, 235G, 235Q, 235R, or 235S, (e) 237A, 237E, 237K, 237N, or 237R, (f) 234A, 234V, or 234F, (g) 233P, (h) 328A, (i) 327Q or 327T, (j) 329A, 329G, 329Y, or 329R (k) 331S, (1) 236F or 236R, (m) 238A, 238E, 238G, 238H, 238I, 238V, 238 W, or 238Y, (n) 248A, (o) 254D, 254E, 254G, 254H, 254I, 254N, 254P, 254Q, 254T, or 254V, (p) 255N, (q) 256H, 256K, 256R, or 256V, (r) 264S, (s) 265H, 265K, 265S, 265Y, or 265A, (t) 267G, 267H, 267I, or 267K, (u) 268K, (v) 269N or 269Q, (w) 270A, 270G, 270M, or 270N, (x) 271T, (y) 272N, (z) 292E, 292F, 292G, or 292I, (aa) 293S, (bb) 301 W, (cc) 304E, (dd) 311E, 311G, or 311S, (ee) 316F, (ff) 328V, (gg) 330R, (hh) 339E or 339L, (ii) 343I or 343V, (jj) 373A, 373G, or 373S, (kk) 376E, 376 W, or 376Y, (11) 380D, (mm) 382D or 382P, (nn) 385P, (oo) 424H, 424M, or 424V, (pp) 434I, (qq) 438G, (rr) 439E, 439H, or 439Q, (ss) 440A, 440D, 440E, 440F, 440M, 440T, or 440V, (tt) E233P, (uu) L235E, (vv) L234A and L235A, (ww) L234A, L235A, and G237A, (xx) L234A, L235A, and P329G, (yy) L234F, L235E, and P331 S, (zz) L234A, L235E, and G237A, (aaa), L234A, L235E, G237A, and P331S (bbb) L234A, L235A, G237A, P238S, H268A, A330S, and P331S (IgG1σ, (ccc) L234A, L235A, and P329A, (ddd) G236R and L328R, (eee) G237A, (fff) F241A, (ggg) V264A, (hhh) D265A, (iii) D265A and N297A, (jjj) D265A and N297G, (kkk) D270A, (111) A330L, (mmm) P331A or P331S, or (nnn) any combination of (a)-(uu), per Kabat numbering. In some cases, antibody C2 comprises a constant region comprising at least about 85%, 87%, 88%, 89%, 90%, 91%, 92%, 93%, 94%, 95%, 96%, 97%, 98%, 99%, or 100% identity to SEQ ID NO: 320. In some cases, antibody C2 comprises a constant region comprising at least about 85%, 87%, 88%, 89%, 90%, 91%, 92%, 93%, 94%, 95%, 96%, 97%, 98%, 99%, or 100% identity to SEQ ID NO: 321. In some cases, antibody C2 comprises a constant region comprising at least about 85%, 87%, 88%, 89%, 90%, 91%, 92%, 93%, 94%, 95%, 96%, 97%, 98%, 99%, or 100% identity to SEQ ID NO: 322. In some cases, antibody C2 comprises a constant region comprising at least about 85%, 87%, 88%, 89%, 90%, 91%, 92%, 93%, 94%, 95%, 96%, 97%, 98%, 99%, or 100% identity to SEQ ID NO: 323. In some cases, antibody C2 comprises a constant region comprising at least about 85%, 87%, 88%, 89%, 90%, 91%, 92%, 93%, 94%, 95%, 96%, 97%, 98%, 99%, or 100% identity to SEQ ID NO: 324. In some cases, antibody C2 comprises a constant region comprising at least about 85%, 87%, 88%, 89%, 90%, 91%, 92%, 93%, 94%, 95%, 96%, 97%, 98%, 99%, or 100% identity to SEQ ID NO: 325. In some cases, antibody C2 comprises a constant region comprising at least about 85%, 87%, 88%, 89%, 90%, 91%, 92%, 93%, 94%, 95%, 96%, 97%, 98%, 99%, or 100% identity to SEQ ID NO: 326. In some cases, antibody C2 comprises a constant region comprising at least about 85%, 87%, 88%, 89%, 90%, 91%, 92%, 93%, 94%, 95%, 96%, 97%, 98%, 99%, or 100% identity to SEQ ID NO: 327. In some cases, antibody C2 comprises a constant region comprising at least about 85%, 87%, 88%, 89%, 90%, 91%, 92%, 93%, 94%, 95%, 96%, 97%, 98%, 99%, or 100% identity to SEQ ID NO: 328. In some cases, antibody C2 comprises a constant region comprising at least about 85%, 87%, 88%, 89%, 90%, 91%, 92%, 93%, 94%, 95%, 96%, 97%, 98%, 99%, or 100% identity to SEQ ID NO: 329. In some cases, antibody C2 comprises a constant region comprising at least about 85%, 87%, 88%, 89%, 90%, 91%, 92%, 93%, 94%, 95%, 96%, 97%, 98%, 99%, or 100% identity to SEQ ID NO: 330. In some cases, antibody C2 comprises a constant region comprising at least about 85%, 87%, 88%, 89%, 90%, 91%, 92%, 93%, 94%, 95%, 96%, 97%, 98%, 99%, or 100% identity to SEQ ID NO: 331. In some cases, antibody C2 comprises a constant region comprising at least about 85%, 87%, 88%, 89%, 90%, 91%, 92%, 93%, 94%, 95%, 96%, 97%, 98%, 99%, or 100% identity to SEQ ID NO: 332. In some cases, antibody C2 comprises a constant region comprising at least about 85%, 87%, 88%, 89%, 90%, 91%, 92%, 93%, 94%, 95%, 96%, 97%, 98%, 99%, or 100% identity to SEQ ID NO: 333. In some cases, antibody C2 comprises a constant region comprising at least about 85%, 87%, 88%, 89%, 90%, 91%, 92%, 93%, 94%, 95%, 96%, 97%, 98%, 99%, or 100% identity to SEQ ID NO: 334. In some cases, antibody C2 comprises a constant region comprising at least about 85%, 87%, 88%, 89%, 90%, 91%, 92%, 93%, 94%, 95%, 96%, 97%, 98%, 99%, or 100% identity to SEQ ID NO: 335. In some cases, antibody C2 comprises a constant region comprising at least about 85%, 87%, 88%, 89%, 90%, 91%, 92%, 93%, 94%, 95%, 96%, 97%, 98%, 99%, or 100% identity to SEQ ID NO: 336. In some cases, antibody C2 comprises a constant region comprising at least about 85%, 87%, 88%, 89%, 90%, 91%, 92%, 93%, 94%, 95%, 96%, 97%, 98%, 99%, or 100% identity to SEQ ID NO: 337. In some cases, antibody C2 comprises a constant region comprising at least about 85%, 87%, 88%, 89%, 90%, 91%, 92%, 93%, 94%, 95%, 96%, 97%, 98%, 99%, or 100% identity to SEQ ID NO: 338. In some cases, antibody C2 comprises a constant region comprising at least about 85%, 87%, 88%, 89%, 90%, 91%, 92%, 93%, 94%, 95%, 96%, 97%, 98%, 99%, or 100% identity to SEQ ID NO: 339. In some cases, antibody C2 comprises a constant region comprising at least about 85%, 87%, 88%, 89%, 90%, 91%, 92%, 93%, 94%, 95%, 96%, 97%, 98%, 99%, or 100% identity to SEQ ID NO: 340. In some cases, antibody C2 comprises a constant region comprising at least about 85%, 87%, 88%, 89%, 90%, 91%, 92%, 93%, 94%, 95%, 96%, 97%, 98%, 99%, or 100% identity to SEQ ID NO: 341. In some cases, antibody C2 comprises a constant region comprising at least about 85%, 87%, 88%, 89%, 90%, 91%, 92%, 93%, 94%, 95%, 96%, 97%, 98%, 99%, or 100% identity to SEQ ID NO: 342. In some cases, antibody C2 comprises a constant region comprising at least about 85%, 87%, 88%, 89%, 90%, 91%, 92%, 93%, 94%, 95%, 96%, 97%, 98%, 99%, or 100% identity to SEQ ID NO: 343. In some cases, antibody C2 comprises a constant region comprising at least about 85%, 87%, 88%, 89%, 90%, 91%, 92%, 93%, 94%, 95%, 96%, 97%, 98%, 99%, or 100% identity to SEQ ID NO: 344. In some cases, antibody C2 comprises a constant region comprising at least about 85%, 87%, 88%, 89%, 90%, 91%, 92%, 93%, 94%, 95%, 96%, 97%, 98%, 99%, or 100% identity to SEQ ID NO: 345. In some cases, antibody C2 comprises a constant region comprising at least about 85%, 87%, 88%, 89%, 90%, 91%, 92%, 93%, 94%, 95%, 96%, 97%, 98%, 99%, or 100% identity to SEQ ID NO: 346. In some cases, antibody C2 comprises a constant region comprising at least about 85%, 87%, 88%, 89%, 90%, 91%, 92%, 93%, 94%, 95%, 96%, 97%, 98%, 99%, or 100% identity to SEQ ID NO: 347. In some cases, antibody C2 comprises a constant region comprising at least about 85%, 87%, 88%, 89%, 90%, 91%, 92%, 93%, 94%, 95%, 96%, 97%, 98%, 99%, or 100% identity to SEQ ID NO: 348. In some cases, antibody C2 comprises a constant region comprising at least about 85%, 87%, 88%, 89%, 90%, 91%, 92%, 93%, 94%, 95%, 96%, 97%, 98%, 99%, or 100% identity to SEQ ID NO: 349. In some cases, antibody C2 comprises a constant region comprising at least about 85%, 87%, 88%, 89%, 90%, 91%, 92%, 93%, 94%, 95%, 96%, 97%, 98%, 99%, or 100% identity to SEQ ID NO: 350. In some cases, antibody C2 comprises a constant region comprising at least about 85%, 87%, 88%, 89%, 90%, 91%, 92%, 93%, 94%, 95%, 96%, 97%, 98%, 99%, or 100% identity to SEQ ID NO: 351. In some cases, antibody C2 comprises a constant region comprising at least about 85%, 87%, 88%, 89%, 90%, 91%, 92%, 93%, 94%, 95%, 96%, 97%, 98%, 99%, or 100% identity to SEQ ID NO: 352. In some cases, antibody C2 comprises a constant region comprising at least about 85%, 87%, 88%, 89%, 90%, 91%, 92%, 93%, 94%, 95%, 96%, 97%, 98%, 99%, or 100% identity to SEQ ID NO: 353. In some cases, antibody C2 comprises a constant region comprising at least about 85%, 87%, 88%, 89%, 90%, 91%, 92%, 93%, 94%, 95%, 96%, 97%, 98%, 99%, or 100% identity to SEQ ID NO: 354. In some cases, antibody C2 comprises a constant region comprising at least about 85%, 87%, 88%, 89%, 90%, 91%, 92%, 93%, 94%, 95%, 96%, 97%, 98%, 99%, or 100% identity to SEQ ID NO: 355. In some cases, antibody C2 comprises a constant region comprising at least about 85%, 87%, 88%, 89%, 90%, 91%, 92%, 93%, 94%, 95%, 96%, 97%, 98%, 99%, or 100% identity to SEQ ID NO: 356. In some cases, antibody C2 comprises a constant region comprising at least about 85%, 87%, 88%, 89%, 90%, 91%, 92%, 93%, 94%, 95%, 96%, 97%, 98%, 99%, or 100% identity to SEQ ID NO: 357. In some cases, antibody C2 comprises a constant region comprising at least about 85%, 87%, 88%, 89%, 90%, 91%, 92%, 93%, 94%, 95%, 96%, 97%, 98%, 99%, or 100% identity to SEQ ID NO: 358. In some cases, antibody C2 comprises a constant region comprising at least about 85%, 87%, 88%, 89%, 90%, 91%, 92%, 93%, 94%, 95%, 96%, 97%, 98%, 99%, or 100% identity to SEQ ID NO: 359. In some cases, antibody C2 comprises a constant region comprising at least about 85%, 87%, 88%, 89%, 90%, 91%, 92%, 93%, 94%, 95%, 96%, 97%, 98%, 99%, or 100% identity to SEQ ID NO: 360. In some cases, antibody C2 comprises a constant region comprising at least about 85%, 87%, 88%, 89%, 90%, 91%, 92%, 93%, 94%, 95%, 96%, 97%, 98%, 99%, or 100% identity to SEQ ID NO: 361. In some cases, antibody C2 comprises a constant region comprising at least about 85%, 87%, 88%, 89%, 90%, 91%, 92%, 93%, 94%, 95%, 96%, 97%, 98%, 99%, or 100% identity to SEQ ID NO: 362. In some cases, antibody C2 comprises at least about 80%, 81%, 82%, 83%, 84%, 85%, 85%, 87%, 88%, 89%, 90%, 91%, 92%, 93%, 94%, 95%, 96%, 97%, 98%, 99%, or 100% monomeric fraction as measured by the size exclusion method described in Example 2. In some cases, antibody C2 is expressed from FreeStyle 293-F cells at an expression level of about or at least about 2, 3, 4, 5, 6, 7, 8, 9, 10, 11, 12, 13, 14, 15, 16, 17, 18, 19, 20, 21, 22, 23, 24, 25, 26, 27, 28, 29, 30, 31, 32, 33, 34, 35, 36, 37, 38, 39, 40, 41, 42, 43, 44, 45, 46, 47, 48, 49, 50, 51, 52, 53, 54, 55, 5, 57, 58, 59 or 60 μg/mL as determined by the method described in Example 2. In some cases, antibody C2 is expressed from FreeStyle 293-F cells at an expression level of between about 2 μg/mL to about 60 μg/mL. In some cases, antibody C2 is expressed from FreeStyle 293-F cells at an expression level of between about 10 μg/mL to about 60 μg/mL.

[1061] In some embodiments, an anti-TL1A antibody comprises antibody D2. As used herein, antibody D2 comprises the CDRs of antibody D2 in Table 20. In some cases, antibody D2 comprises a heavy chain framework comprising SEQ ID NO: 302 (X1VQLVQSGAEVKKPGASVKVSCKAS[HCDR 1]WVX2QX3PGQGLEWX4G[HCDR2]RX5TX6TX7DTSTSTX8YX9ELSSLRSEDTAVYYC[HCDR3]WGQGTTVTVSS), wherein X1=Q or E, X2=R or K, X3=A or R, X4=M or I, X5=V or A, X6=M or I, X7=R or T, X8=V or A, and X9=M or L. In some cases, antibody D2 comprises a light chain framework comprising SEQ ID NO: 303 (EIVLTQSPGTLSLSPGERATLSC[LCDR 1]WYQQKPGQAPRX10X11IY[LCDR2]GIPDR FSGSGSGTDFTLTISRLEPEDFAVYYC[LCDR3]FGGGTKLEIK), wherein X10=L or P and X11=L or W. In some cases, antibody D2 comprises a heavy chain variable region comprising human IGHV1-46*02 framework or a modified human IGHV1-46*02 framework, wherein the modified human IGHV1-46*02 framework has less than or equal to about 1, 2, 3, 4, 5, 6, 7, 8, 9, 10, 11, 12, 13, 14, 15, 16, 17, 18, 19, or 20 amino acid substitutions in the framework. In some cases, antibody D2 comprises a light chain variable region comprising human IGKV3-20 framework or a modified human IGKV3-20 framework, wherein the modified human IGKV3-20 framework has less than or equal to about 1, 2, 3, 4, 5, 6, 7, 8, 9, 10, 11, 12, 13, 14, 15, 16, 17, 18, 19, or 20 amino acid substitutions in the framework. In some cases, antibody D2 comprises a constant region comprising reduced ADCC and/or CDC as compared to IgG1. For instance, antibody D2 comprises a human IgG1 Fc region comprising (a) 297A, 297Q, 297G, or 297D, (b) 279F, 279K, or 279L, (c) 228P, (d) 235A, 235E, 235G, 235Q, 235R, or 235S, (e) 237A, 237E, 237K, 237N, or 237R, (f) 234A, 234V, or 234F, (g) 233P, (h) 328A, (i) 327Q or 327T, (j) 329A, 329G, 329Y, or 329R (k) 331S, (1) 236F or 236R, (m) 238A, 238E, 238G, 238H, 238I, 238V, 238 W, or 238Y, (n) 248A, (o) 254D, 254E, 254G, 254H, 254I, 254N, 254P, 254Q, 254T, or 254V, (p) 255N, (q) 256H, 256K, 256R, or 256V, (r) 264S, (s) 265H, 265K, 265S, 265Y, or 265A, (t) 267G, 267H, 267I, or 267K, (u) 268K, (v) 269N or 269Q, (w) 270A, 270G, 270M, or 270N, (x) 271T, (y) 272N, (z) 292E, 292F, 292G, or 292I, (aa) 293S, (bb) 301 W, (cc) 304E, (dd) 311E, 311G, or 311S, (ee) 316F, (ff) 328V, (gg) 330R, (hh) 339E or 339L, (ii) 343I or 343V, (jj) 373A, 373G, or 373S, (kk) 376E, 376 W, or 376Y, (11) 380D, (mm) 382D or 382P, (nn) 385P, (oo) 424H, 424M, or 424V, (pp) 434I, (qq) 438G, (rr) 439E, 439H, or 439Q, (ss) 440A, 440D, 440E, 440F, 440M, 440T, or 440V, (tt) E233P, (uu) L235E, (vv) L234A and L235A, (ww) L234A, L235A, and G237A, (xx) L234A, L235A, and P329G, (yy) L234F, L235E, and P331 S, (zz) L234A, L235E, and G237A, (aaa), L234A, L235E, G237A, and P331S (bbb) L234A, L235A, G237A, P238S, H268A, A330S, and P331 S (IgG1σ, (ccc) L234A, L235A, and P329A, (ddd) G236R and L328R, (eee) G237A, (fff) F241A, (ggg) V264A, (hhh) D265A, (iii) D265A and N297A, (jjj) D265A and N297G, (kkk) D270A, (111) A330L, (mmm) P331A or P331S, or (nnn) any combination of (a)-(uu), per Kabat numbering. In some cases, antibody D2 comprises a constant region comprising at least about 85%, 87%, 88%, 89%, 90%, 91%, 92%, 93%, 94%, 95%, 96%, 97%, 98%, 99%, or 100% identity to SEQ ID NO: 320. In some cases, antibody D2 comprises a constant region comprising at least about 85%, 87%, 88%, 89%, 90%, 91%, 92%, 93%, 94%, 95%, 96%, 97%, 98%, 99%, or 100% identity to SEQ ID NO: 321. In some cases, antibody D2 comprises a constant region comprising at least about 85%, 87%, 88%, 89%, 90%, 91%, 92%, 93%, 94%, 95%, 96%, 97%, 98%, 99%, or 100% identity to SEQ ID NO: 322. In some cases, antibody D2 comprises a constant region comprising at least about 85%, 87%, 88%, 89%, 90%, 91%, 92%, 93%, 94%, 95%, 96%, 97%, 98%, 99%, or 100% identity to SEQ ID NO: 323. In some cases, antibody D2 comprises a constant region comprising at least about 85%, 87%, 88%, 89%, 90%, 91%, 92%, 93%, 94%, 95%, 96%, 97%, 98%, 99%, or 100% identity to SEQ ID NO: 324. In some cases, antibody D2 comprises a constant region comprising at least about 85%, 87%, 88%, 89%, 90%, 91%, 92%, 93%, 94%, 95%, 96%, 97%, 98%, 99%, or 100% identity to SEQ ID NO: 325. In some cases, antibody D2 comprises a constant region comprising at least about 85%, 87%, 88%, 89%, 90%, 91%, 92%, 93%, 94%, 95%, 96%, 97%, 98%, 99%, or 100% identity to SEQ ID NO: 326. In some cases, antibody D2 comprises a constant region comprising at least about 85%, 87%, 88%, 89%, 90%, 91%, 92%, 93%, 94%, 95%, 96%, 97%, 98%, 99%, or 100% identity to SEQ ID NO: 327. In some cases, antibody D2 comprises a constant region comprising at least about 85%, 87%, 88%, 89%, 90%, 91%, 92%, 93%, 94%, 95%, 96%, 97%, 98%, 99%, or 100% identity to SEQ ID NO: 328. In some cases, antibody D2 comprises a constant region comprising at least about 85%, 87%, 88%, 89%, 90%, 91%, 92%, 93%, 94%, 95%, 96%, 97%, 98%, 99%, or 100% identity to SEQ ID NO: 329. In some cases, antibody D2 comprises a constant region comprising at least about 85%, 87%, 88%, 89%, 90%, 91%, 92%, 93%, 94%, 95%, 96%, 97%, 98%, 99%, or 100% identity to SEQ ID NO: 330. In some cases, antibody D2 comprises a constant region comprising at least about 85%, 87%, 88%, 89%, 90%, 91%, 92%, 93%, 94%, 95%, 96%, 97%, 98%, 99%, or 100% identity to SEQ ID NO: 331. In some cases, antibody D2 comprises a constant region comprising at least about 85%, 87%, 88%, 89%, 90%, 91%, 92%, 93%, 94%, 95%, 96%, 97%, 98%, 99%, or 100% identity to SEQ ID NO: 332. In some cases, antibody D2 comprises a constant region comprising at least about 85%, 87%, 88%, 89%, 90%, 91%, 92%, 93%, 94%, 95%, 96%, 97%, 98%, 99%, or 100% identity to SEQ ID NO: 333. In some cases, antibody D2 comprises a constant region comprising at least about 85%, 87%, 88%, 89%, 90%, 91%, 92%, 93%, 94%, 95%, 96%, 97%, 98%, 99%, or 100% identity to SEQ ID NO: 334. In some cases, antibody D2 comprises a constant region comprising at least about 85%, 87%, 88%, 89%, 90%, 91%, 92%, 93%, 94%, 95%, 96%, 97%, 98%, 99%, or 100% identity to SEQ ID NO: 335. In some cases, antibody D2 comprises a constant region comprising at least about 85%, 87%, 88%, 89%, 90%, 91%, 92%, 93%, 94%, 95%, 96%, 97%, 98%, 99%, or 100% identity to SEQ ID NO: 336. In some cases, antibody D2 comprises a constant region comprising at least about 85%, 87%, 88%, 89%, 90%, 91%, 92%, 93%, 94%, 95%, 96%, 97%, 98%, 99%, or 100% identity to SEQ ID NO: 337. In some cases, antibody D2 comprises a constant region comprising at least about 85%, 87%, 88%, 89%, 90%, 91%, 92%, 93%, 94%, 95%, 96%, 97%, 98%, 99%, or 100% identity to SEQ ID NO: 338. In some cases, antibody D2 comprises a constant region comprising at least about 85%, 87%, 88%, 89%, 90%, 91%, 92%, 93%, 94%, 95%, 96%, 97%, 98%, 99%, or 100% identity to SEQ ID NO: 339. In some cases, antibody D2 comprises a constant region comprising at least about 85%, 87%, 88%, 89%, 90%, 91%, 92%, 93%, 94%, 95%, 96%, 97%, 98%, 99%, or 100% identity to SEQ ID NO: 340. In some cases, antibody D2 comprises a constant region comprising at least about 85%, 87%, 88%, 89%, 90%, 91%, 92%, 93%, 94%, 95%, 96%, 97%, 98%, 99%, or 100% identity to SEQ ID NO: 341. In some cases, antibody D2 comprises a constant region comprising at least about 85%, 87%, 88%, 89%, 90%, 91%, 92%, 93%, 94%, 95%, 96%, 97%, 98%, 99%, or 100% identity to SEQ ID NO: 342. In some cases, antibody D2 comprises a constant region comprising at least about 85%, 87%, 88%, 89%, 90%, 91%, 92%, 93%, 94%, 95%, 96%, 97%, 98%, 99%, or 100% identity to SEQ ID NO: 343. In some cases, antibody D2 comprises a constant region comprising at least about 85%, 87%, 88%, 89%, 90%, 91%, 92%, 93%, 94%, 95%, 96%, 97%, 98%, 99%, or 100% identity to SEQ ID NO: 344. In some cases, antibody D2 comprises a constant region comprising at least about 85%, 87%, 88%, 89%, 90%, 91%, 92%, 93%, 94%, 95%, 96%, 97%, 98%, 99%, or 100% identity to SEQ ID NO: 345. In some cases, antibody D2 comprises a constant region comprising at least about 85%, 87%, 88%, 89%, 90%, 91%, 92%, 93%, 94%, 95%, 96%, 97%, 98%, 99%, or 100% identity to SEQ ID NO: 346. In some cases, antibody D2 comprises a constant region comprising at least about 85%, 87%, 88%, 89%, 90%, 91%, 92%, 93%, 94%, 95%, 96%, 97%, 98%, 99%, or 100% identity to SEQ ID NO: 347. In some cases, antibody D2 comprises a constant region comprising at least about 85%, 87%, 88%, 89%, 90%, 91%, 92%, 93%, 94%, 95%, 96%, 97%, 98%, 99%, or 100% identity to SEQ ID NO: 348. In some cases, antibody D2 comprises a constant region comprising at least about 85%, 87%, 88%, 89%, 90%, 91%, 92%, 93%, 94%, 95%, 96%, 97%, 98%, 99%, or 100% identity to SEQ ID NO: 349. In some cases, antibody D2 comprises a constant region comprising at least about 85%, 87%, 88%, 89%, 90%, 91%, 92%, 93%, 94%, 95%, 96%, 97%, 98%, 99%, or 100% identity to SEQ ID NO: 350. In some cases, antibody D2 comprises a constant region comprising at least about 85%, 87%, 88%, 89%, 90%, 91%, 92%, 93%, 94%, 95%, 96%, 97%, 98%, 99%, or 100% identity to SEQ ID NO: 351. In some cases, antibody D2 comprises a constant region comprising at least about 85%, 87%, 88%, 89%, 90%, 91%, 92%, 93%, 94%, 95%, 96%, 97%, 98%, 99%, or 100% identity to SEQ ID NO: 352. In some cases, antibody D2 comprises a constant region comprising at least about 85%, 87%, 88%, 89%, 90%, 91%, 92%, 93%, 94%, 95%, 96%, 97%, 98%, 99%, or 100% identity to SEQ ID NO: 353. In some cases, antibody D2 comprises a constant region comprising at least about 85%, 87%, 88%, 89%, 90%, 91%, 92%, 93%, 94%, 95%, 96%, 97%, 98%, 99%, or 100% identity to SEQ ID NO: 354. In some cases, antibody D2 comprises a constant region comprising at least about 85%, 87%, 88%, 89%, 90%, 91%, 92%, 93%, 94%, 95%, 96%, 97%, 98%, 99%, or 100% identity to SEQ ID NO: 355. In some cases, antibody D2 comprises a constant region comprising at least about 85%, 87%, 88%, 89%, 90%, 91%, 92%, 93%, 94%, 95%, 96%, 97%, 98%, 99%, or 100% identity to SEQ ID NO: 356. In some cases, antibody D2 comprises a constant region comprising at least about 85%, 87%, 88%, 89%, 90%, 91%, 92%, 93%, 94%, 95%, 96%, 97%, 98%, 99%, or 100% identity to SEQ ID NO: 357. In some cases, antibody D2 comprises a constant region comprising at least about 85%, 87%, 88%, 89%, 90%, 91%, 92%, 93%, 94%, 95%, 96%, 97%, 98%, 99%, or 100% identity to SEQ ID NO: 358. In some cases, antibody D2 comprises a constant region comprising at least about 85%, 87%, 88%, 89%, 90%, 91%, 92%, 93%, 94%, 95%, 96%, 97%, 98%, 99%, or 100% identity to SEQ ID NO: 359. In some cases, antibody D2 comprises a constant region comprising at least about 85%, 87%, 88%, 89%, 90%, 91%, 92%, 93%, 94%, 95%, 96%, 97%, 98%, 99%, or 100% identity to SEQ ID NO: 360. In some cases, antibody D2 comprises a constant region comprising at least about 85%, 87%, 88%, 89%, 90%, 91%, 92%, 93%, 94%, 95%, 96%, 97%, 98%, 99%, or 100% identity to SEQ ID NO: 361. In some cases, antibody D2 comprises a constant region comprising at least about 85%, 87%, 88%, 89%, 90%, 91%, 92%, 93%, 94%, 95%, 96%, 97%, 98%, 99%, or 100% identity to SEQ ID NO: 362. In some cases, antibody D2 comprises at least about 80%, 81%, 82%, 83%, 84%, 85%, 85%, 87%, 88%, 89%, 90%, 91%, 92%, 93%, 94%, 95%, 96%, 97%, 98%, 99%, or 100% monomeric fraction as measured by the size exclusion method described in Example 2. In some cases, antibody D2 is expressed from FreeStyle 293-F cells at an expression level of about or at least about 2, 3, 4, 5, 6, 7, 8, 9, 10, 11, 12, 13, 14, 15, 16, 17, 18, 19, 20, 21, 22, 23, 24, 25, 26, 27, 28, 29, 30, 31, 32, 33, 34, 35, 36, 37, 38, 39, 40, 41, 42, 43, 44, 45, 46, 47, 48, 49, 50, 51, 52, 53, 54, 55, 5, 57, 58, 59 or 60 μg/mL as determined by the method described in Example 2. In some cases, antibody D2 is expressed from FreeStyle 293-F cells at an expression level of between about 2 μg/mL to about 60 μg/mL. In some cases, antibody D2 is expressed from FreeStyle 293-F cells at an expression level of between about 10 μg/mL to about 60 μg/mL.

[1062] In some embodiments, an anti-TL1A antibody comprises antibody E2. As used herein, antibody E2 comprises the CDRs of antibody E2 in Table 20. In some cases, antibody E2 comprises a heavy chain framework comprising SEQ ID NO: 302 (X1VQLVQSGAEVKKPGASVKVSCKAS[HCDR 1]WVX2QX3PGQGLEWX4G[HCDR2]RX5TX6TX7DTSTSTX8YX9ELSSLRSEDTAVYYC[HCDR3]WGQGTTVTVSS), wherein X1=Q or E, X2=R or K, X3=A or R, X4=M or I, X5=V or A, X6=M or I, X7=R or T, X8=V or A, and X9=M or L. In some cases, antibody E2 comprises a light chain framework comprising SEQ ID NO: 303 (EIVLTQSPGTLSLSPGERATLSC[LCDR 1]WYQQKPGQAPRX10X11IY[LCDR2]GIPDR FSGSGSGTDFTLTISRLEPEDFAVYYC[LCDR3]FGGGTKLEIK), wherein X10=L or P and X11=L or W. In some cases, antibody E2 comprises a heavy chain variable region comprising human IGHV1-46*02 framework or a modified human IGHV1-46*02 framework, wherein the modified human IGHV1-46*02 framework has less than or equal to about 1, 2, 3, 4, 5, 6, 7, 8, 9, 10, 11, 12, 13, 14, 15, 16, 17, 18, 19, or 20 amino acid substitutions in the framework. In some cases, antibody E2 comprises a light chain variable region comprising human IGKV3-20 framework or a modified human IGKV3-20 framework, wherein the modified human IGKV3-20 framework has less than or equal to about 1, 2, 3, 4, 5, 6, 7, 8, 9, 10, 11, 12, 13, 14, 15, 16, 17, 18, 19, or 20 amino acid substitutions in the framework. In some cases, antibody E2 comprises a constant region comprising reduced ADCC and/or CDC as compared to IgG1. For instance, antibody E2 comprises a human IgG1 Fc region comprising (a) 297A, 297Q, 297G, or 297D, (b) 279F, 279K, or 279L, (c) 228P, (d) 235A, 235E, 235G, 235Q, 235R, or 235S, (e) 237A, 237E, 237K, 237N, or 237R, (f) 234A, 234V, or 234F, (g) 233P, (h) 328A, (i) 327Q or 327T, (j) 329A, 329G, 329Y, or 329R (k) 331S, (1) 236F or 236R, (m) 238A, 238E, 238G, 238H, 238I, 238V, 238 W, or 238Y, (n) 248A, (o) 254D, 254E, 254G, 254H, 254I, 254N, 254P, 254Q, 254T, or 254V, (p) 255N, (q) 256H, 256K, 256R, or 256V, (r) 264S, (s) 265H, 265K, 265S, 265Y, or 265A, (t) 267G, 267H, 267I, or 267K, (u) 268K, (v) 269N or 269Q, (w) 270A, 270G, 270M, or 270N, (x) 271T, (y) 272N, (z) 292E, 292F, 292G, or 292I, (aa) 293S, (bb) 301 W, (cc) 304E, (dd) 311E, 311G, or 311S, (ee) 316F, (ff) 328V, (gg) 330R, (hh) 339E or 339L, (ii) 343I or 343V, (jj) 373A, 373G, or 373S, (kk) 376E, 376 W, or 376Y, (11) 380D, (mm) 382D or 382P, (nn) 385P, (oo) 424H, 424M, or 424V, (pp) 434I, (qq) 438G, (rr) 439E, 439H, or 439Q, (ss) 440A, 440D, 440E, 440F, 440M, 440T, or 440V, (tt) E233P, (uu) L235E, (vv) L234A and L235A, (ww) L234A, L235A, and G237A, (xx) L234A, L235A, and P329G, (yy) L234F, L235E, and P331 S, (zz) L234A, L235E, and G237A, (aaa), L234A, L235E, G237A, and P331S (bbb) L234A, L235A, G237A, P238S, H268A, A330S, and P331S (IgG1σ, (ccc) L234A, L235A, and P329A, (ddd) G236R and L328R, (eee) G237A, (fff) F241A, (ggg) V264A, (hhh) D265A, (iii) D265A and N297A, (jjj) D265A and N297G, (kkk) D270A, (111) A330L, (mmm) P331A or P331S, or (nnn) any combination of (a)-(uu), per Kabat numbering. In some cases, antibody E2 comprises a constant region comprising at least about 85%, 87%, 88%, 89%, 90%, 91%, 92%, 93%, 94%, 95%, 96%, 97%, 98%, 99%, or 100% identity to SEQ ID NO: 320. In some cases, antibody E2 comprises a constant region comprising at least about 85%, 87%, 88%, 89%, 90%, 91%, 92%, 93%, 94%, 95%, 96%, 97%, 98%, 99%, or 100% identity to SEQ ID NO: 321. In some cases, antibody E2 comprises a constant region comprising at least about 85%, 87%, 88%, 89%, 90%, 91%, 92%, 93%, 94%, 95%, 96%, 97%, 98%, 99%, or 100% identity to SEQ ID NO: 322. In some cases, antibody E2 comprises a constant region comprising at least about 85%, 87%, 88%, 89%, 90%, 91%, 92%, 93%, 94%, 95%, 96%, 97%, 98%, 99%, or 100% identity to SEQ ID NO: 323. In some cases, antibody E2 comprises a constant region comprising at least about 85%, 87%, 88%, 89%, 90%, 91%, 92%, 93%, 94%, 95%, 96%, 97%, 98%, 99%, or 100% identity to SEQ ID NO: 324. In some cases, antibody E2 comprises a constant region comprising at least about 85%, 87%, 88%, 89%, 90%, 91%, 92%, 93%, 94%, 95%, 96%, 97%, 98%, 99%, or 100% identity to SEQ ID NO: 325. In some cases, antibody E2 comprises a constant region comprising at least about 85%, 87%, 88%, 89%, 90%, 91%, 92%, 93%, 94%, 95%, 96%, 97%, 98%, 99%, or 100% identity to SEQ ID NO: 326. In some cases, antibody E2 comprises a constant region comprising at least about 85%, 87%, 88%, 89%, 90%, 91%, 92%, 93%, 94%, 95%, 96%, 97%, 98%, 99%, or 100% identity to SEQ ID NO: 327. In some cases, antibody E2 comprises a constant region comprising at least about 85%, 87%, 88%, 89%, 90%, 91%, 92%, 93%, 94%, 95%, 96%, 97%, 98%, 99%, or 100% identity to SEQ ID NO: 328. In some cases, antibody E2 comprises a constant region comprising at least about 85%, 87%, 88%, 89%, 90%, 91%, 92%, 93%, 94%, 95%, 96%, 97%, 98%, 99%, or 100% identity to SEQ ID NO: 329. In some cases, antibody E2 comprises a constant region comprising at least about 85%, 87%, 88%, 89%, 90%, 91%, 92%, 93%, 94%, 95%, 96%, 97%, 98%, 99%, or 100% identity to SEQ ID NO: 330. In some cases, antibody E2 comprises a constant region comprising at least about 85%, 87%, 88%, 89%, 90%, 91%, 92%, 93%, 94%, 95%, 96%, 97%, 98%, 99%, or 100% identity to SEQ ID NO: 331. In some cases, antibody E2 comprises a constant region comprising at least about 85%, 87%, 88%, 89%, 90%, 91%, 92%, 93%, 94%, 95%, 96%, 97%, 98%, 99%, or 100% identity to SEQ ID NO: 332. In some cases, antibody E2 comprises a constant region comprising at least about 85%, 87%, 88%, 89%, 90%, 91%, 92%, 93%, 94%, 95%, 96%, 97%, 98%, 99%, or 100% identity to SEQ ID NO: 333. In some cases, antibody E2 comprises a constant region comprising at least about 85%, 87%, 88%, 89%, 90%, 91%, 92%, 93%, 94%, 95%, 96%, 97%, 98%, 99%, or 100% identity to SEQ ID NO: 334. In some cases, antibody E2 comprises a constant region comprising at least about 85%, 87%, 88%, 89%, 90%, 91%, 92%, 93%, 94%, 95%, 96%, 97%, 98%, 99%, or 100% identity to SEQ ID NO: 335. In some cases, antibody E2 comprises a constant region comprising at least about 85%, 87%, 88%, 89%, 90%, 91%, 92%, 93%, 94%, 95%, 96%, 97%, 98%, 99%, or 100% identity to SEQ ID NO: 336. In some cases, antibody E2 comprises a constant region comprising at least about 85%, 87%, 88%, 89%, 90%, 91%, 92%, 93%, 94%, 95%, 96%, 97%, 98%, 99%, or 100% identity to SEQ ID NO: 337. In some cases, antibody E2 comprises a constant region comprising at least about 85%, 87%, 88%, 89%, 90%, 91%, 92%, 93%, 94%, 95%, 96%, 97%, 98%, 99%, or 100% identity to SEQ ID NO: 338. In some cases, antibody E2 comprises a constant region comprising at least about 85%, 87%, 88%, 89%, 90%, 91%, 92%, 93%, 94%, 95%, 96%, 97%, 98%, 99%, or 100% identity to SEQ ID NO: 339. In some cases, antibody E2 comprises a constant region comprising at least about 85%, 87%, 88%, 89%, 90%, 91%, 92%, 93%, 94%, 95%, 96%, 97%, 98%, 99%, or 100% identity to SEQ ID NO: 340. In some cases, antibody E2 comprises a constant region comprising at least about 85%, 87%, 88%, 89%, 90%, 91%, 92%, 93%, 94%, 95%, 96%, 97%, 98%, 99%, or 100% identity to SEQ ID NO: 341. In some cases, antibody E2 comprises a constant region comprising at least about 85%, 87%, 88%, 89%, 90%, 91%, 92%, 93%, 94%, 95%, 96%, 97%, 98%, 99%, or 100% identity to SEQ ID NO: 342. In some cases, antibody E2 comprises a constant region comprising at least about 85%, 87%, 88%, 89%, 90%, 91%, 92%, 93%, 94%, 95%, 96%, 97%, 98%, 99%, or 100% identity to SEQ ID NO: 343. In some cases, antibody E2 comprises a constant region comprising at least about 85%, 87%, 88%, 89%, 90%, 91%, 92%, 93%, 94%, 95%, 96%, 97%, 98%, 99%, or 100% identity to SEQ ID NO: 344. In some cases, antibody E2 comprises a constant region comprising at least about 85%, 87%, 88%, 89%, 90%, 91%, 92%, 93%, 94%, 95%, 96%, 97%, 98%, 99%, or 100% identity to SEQ ID NO: 345. In some cases, antibody E2 comprises a constant region comprising at least about 85%, 87%, 88%, 89%, 90%, 91%, 92%, 93%, 94%, 95%, 96%, 97%, 98%, 99%, or 100% identity to SEQ ID NO: 346. In some cases, antibody E2 comprises a constant region comprising at least about 85%, 87%, 88%, 89%, 90%, 91%, 92%, 93%, 94%, 95%, 96%, 97%, 98%, 99%, or 100% identity to SEQ ID NO: 347. In some cases, antibody E2 comprises a constant region comprising at least about 85%, 87%, 88%, 89%, 90%, 91%, 92%, 93%, 94%, 95%, 96%, 97%, 98%, 99%, or 100% identity to SEQ ID NO: 348. In some cases, antibody E2 comprises a constant region comprising at least about 85%, 87%, 88%, 89%, 90%, 91%, 92%, 93%, 94%, 95%, 96%, 97%, 98%, 99%, or 100% identity to SEQ ID NO: 349. In some cases, antibody E2 comprises a constant region comprising at least about 85%, 87%, 88%, 89%, 90%, 91%, 92%, 93%, 94%, 95%, 96%, 97%, 98%, 99%, or 100% identity to SEQ ID NO: 350. In some cases, antibody E2 comprises a constant region comprising at least about 85%, 87%, 88%, 89%, 90%, 91%, 92%, 93%, 94%, 95%, 96%, 97%, 98%, 99%, or 100% identity to SEQ ID NO: 351. In some cases, antibody E2 comprises a constant region comprising at least about 85%, 87%, 88%, 89%, 90%, 91%, 92%, 93%, 94%, 95%, 96%, 97%, 98%, 99%, or 100% identity to SEQ ID NO: 352. In some cases, antibody E2 comprises a constant region comprising at least about 85%, 87%, 88%, 89%, 90%, 91%, 92%, 93%, 94%, 95%, 96%, 97%, 98%, 99%, or 100% identity to SEQ ID NO: 353. In some cases, antibody E2 comprises a constant region comprising at least about 85%, 87%, 88%, 89%, 90%, 91%, 92%, 93%, 94%, 95%, 96%, 97%, 98%, 99%, or 100% identity to SEQ ID NO: 354. In some cases, antibody E2 comprises a constant region comprising at least about 85%, 87%, 88%, 89%, 90%, 91%, 92%, 93%, 94%, 95%, 96%, 97%, 98%, 99%, or 100% identity to SEQ ID NO: 355. In some cases, antibody E2 comprises a constant region comprising at least about 85%, 87%, 88%, 89%, 90%, 91%, 92%, 93%, 94%, 95%, 96%, 97%, 98%, 99%, or 100% identity to SEQ ID NO: 356. In some cases, antibody E2 comprises a constant region comprising at least about 85%, 87%, 88%, 89%, 90%, 91%, 92%, 93%, 94%, 95%, 96%, 97%, 98%, 99%, or 100% identity to SEQ ID NO: 357. In some cases, antibody E2 comprises a constant region comprising at least about 85%, 87%, 88%, 89%, 90%, 91%, 92%, 93%, 94%, 95%, 96%, 97%, 98%, 99%, or 100% identity to SEQ ID NO: 358. In some cases, antibody E2 comprises a constant region comprising at least about 85%, 87%, 88%, 89%, 90%, 91%, 92%, 93%, 94%, 95%, 96%, 97%, 98%, 99%, or 100% identity to SEQ ID NO: 359. In some cases, antibody E2 comprises a constant region comprising at least about 85%, 87%, 88%, 89%, 90%, 91%, 92%, 93%, 94%, 95%, 96%, 97%, 98%, 99%, or 100% identity to SEQ ID NO: 360. In some cases, antibody E2 comprises a constant region comprising at least about 85%, 87%, 88%, 89%, 90%, 91%, 92%, 93%, 94%, 95%, 96%, 97%, 98%, 99%, or 100% identity to SEQ ID NO: 361. In some cases, antibody E2 comprises a constant region comprising at least about 85%, 87%, 88%, 89%, 90%, 91%, 92%, 93%, 94%, 95%, 96%, 97%, 98%, 99%, or 100% identity to SEQ ID NO: 362. In some cases, antibody E2 comprises at least about 80%, 81%, 82%, 83%, 84%, 85%, 85%, 87%, 88%, 89%, 90%, 91%, 92%, 93%, 94%, 95%, 96%, 97%, 98%, 99%, or 100% monomeric fraction as measured by the size exclusion method described in Example 2. In some cases, antibody E2 is expressed from FreeStyle 293-F cells at an expression level of about or at least about 2, 3, 4, 5, 6, 7, 8, 9, 10, 11, 12, 13, 14, 15, 16, 17, 18, 19, 20, 21, 22, 23, 24, 25, 26, 27, 28, 29, 30, 31, 32, 33, 34, 35, 36, 37, 38, 39, 40, 41, 42, 43, 44, 45, 46, 47, 48, 49, 50, 51, 52, 53, 54, 55, 5, 57, 58, 59 or 60 μg/mL as determined by the method described in Example 2. In some cases, antibody E2 is expressed from FreeStyle 293-F cells at an expression level of between about 2 μg/mL to about 60 μg/mL. In some cases, antibody E2 is expressed from FreeStyle 293-F cells at an expression level of between about 10 μg/mL to about 60 μg/mL.

[1063] In some embodiments, an anti-TL1A antibody comprises antibody F2. As used herein, antibody F2 comprises the CDRs of antibody F2 in Table 20. In some cases, antibody F2 comprises a heavy chain framework comprising SEQ ID NO: 302 (X1VQLVQSGAEVKKPGASVKVSCKAS[HCDR 1]WVX2QX3PGQGLEWX4G[HCDR2]RX5TX6TX7DTSTSTX8YX9ELSSLRSEDTAVYYC[HCDR3]WGQGTTVTVSS), wherein X1=Q or E, X2=R or K, X3=A or R, X4=M or I, X5=V or A, X6=M or I, X7=R or T, X8=V or A, and X9=M or L. In some cases, antibody F2 comprises a light chain framework comprising SEQ ID NO: 303 (EIVLTQSPGTLSLSPGERATLSC[LCDR 1]WYQQKPGQAPRX10X11IY[LCDR2]GIPDR FSGSGSGTDFTLTISRLEPEDFAVYYC[LCDR3]FGGGTKLEIK), wherein X10=L or P and X11=L or W. In some cases, antibody F2 comprises a heavy chain variable region comprising human IGHV1-46*02 framework or a modified human IGHV1-46*02 framework, wherein the modified human IGHV1-46*02 framework has less than or equal to about 1, 2, 3, 4, 5, 6, 7, 8, 9, 10, 11, 12, 13, 14, 15, 16, 17, 18, 19, or 20 amino acid substitutions in the framework. In some cases, antibody F2 comprises a light chain variable region comprising human IGKV3-20 framework or a modified human IGKV3-20 framework, wherein the modified human IGKV3-20 framework has less than or equal to about 1, 2, 3, 4, 5, 6, 7, 8, 9, 10, 11, 12, 13, 14, 15, 16, 17, 18, 19, or 20 amino acid substitutions in the framework. In some cases, antibody F2 comprises a constant region comprising reduced ADCC and/or CDC as compared to IgG1. For instance, antibody F2 comprises a human IgG1 Fc region comprising (a) 297A, 297Q, 297G, or 297D, (b) 279F, 279K, or 279L, (c) 228P, (d) 235A, 235E, 235G, 235Q, 235R, or 235S, (e) 237A, 237E, 237K, 237N, or 237R, (f) 234A, 234V, or 234F, (g) 233P, (h) 328A, (i) 327Q or 327T, (j) 329A, 329G, 329Y, or 329R (k) 331S, (1) 236F or 236R, (m) 238A, 238E, 238G, 238H, 238I, 238V, 238 W, or 238Y, (n) 248A, (o) 254D, 254E, 254G, 254H, 254I, 254N, 254P, 254Q, 254T, or 254V, (p) 255N, (q) 256H, 256K, 256R, or 256V, (r) 264S, (s) 265H, 265K, 265S, 265Y, or 265A, (t) 267G, 267H, 267I, or 267K, (u) 268K, (v) 269N or 269Q, (w) 270A, 270G, 270M, or 270N, (x) 271T, (y) 272N, (z) 292E, 292F, 292G, or 292I, (aa) 293S, (bb) 301 W, (cc) 304E, (dd) 311E, 311G, or 311S, (ee) 316F, (ff) 328V, (gg) 330R, (hh) 339E or 339L, (ii) 343I or 343V, (jj) 373A, 373G, or 373S, (kk) 376E, 376 W, or 376Y, (11) 380D, (mm) 382D or 382P, (nn) 385P, (oo) 424H, 424M, or 424V, (pp) 434I, (qq) 438G, (rr) 439E, 439H, or 439Q, (ss) 440A, 440D, 440E, 440F, 440M, 440T, or 440V, (tt) E233P, (uu) L235E, (vv) L234A and L235A, (ww) L234A, L235A, and G237A, (xx) L234A, L235A, and P329G, (yy) L234F, L235E, and P331 S, (zz) L234A, L235E, and G237A, (aaa), L234A, L235E, G237A, and P331S (bbb) L234A, L235A, G237A, P238S, H268A, A330S, and P331S (IgG1σ, (ccc) L234A, L235A, and P329A, (ddd) G236R and L328R, (eee) G237A, (fff) F241A, (ggg) V264A, (hhh) D265A, (iii) D265A and N297A, (jjj) D265A and N297G, (kkk) D270A, (111) A330L, (mmm) P331A or P331S, or (nnn) any combination of (a)-(uu), per Kabat numbering. In some cases, antibody F2 comprises a constant region comprising at least about 85%, 87%, 88%, 89%, 90%, 91%, 92%, 93%, 94%, 95%, 96%, 97%, 98%, 99%, or 100% identity to SEQ ID NO: 320. In some cases, antibody F2 comprises a constant region comprising at least about 85%, 87%, 88%, 89%, 90%, 91%, 92%, 93%, 94%, 95%, 96%, 97%, 98%, 99%, or 100% identity to SEQ ID NO: 321. In some cases, antibody F2 comprises a constant region comprising at least about 85%, 87%, 88%, 89%, 90%, 91%, 92%, 93%, 94%, 95%, 96%, 97%, 98%, 99%, or 100% identity to SEQ ID NO: 322. In some cases, antibody F2 comprises a constant region comprising at least about 85%, 87%, 88%, 89%, 90%, 91%, 92%, 93%, 94%, 95%, 96%, 97%, 98%, 99%, or 100% identity to SEQ ID NO: 323. In some cases, antibody F2 comprises a constant region comprising at least about 85%, 87%, 88%, 89%, 90%, 91%, 92%, 93%, 94%, 95%, 96%, 97%, 98%, 99%, or 100% identity to SEQ ID NO: 324. In some cases, antibody F2 comprises a constant region comprising at least about 85%, 87%, 88%, 89%, 90%, 91%, 92%, 93%, 94%, 95%, 96%, 97%, 98%, 99%, or 100% identity to SEQ ID NO: 325. In some cases, antibody F2 comprises a constant region comprising at least about 85%, 87%, 88%, 89%, 90%, 91%, 92%, 93%, 94%, 95%, 96%, 97%, 98% 99% or 100% identity to SEQ ID NO: 326. In some cases, antibody F2 comprises a constant region comprising at least about 85%, 87%, 88%, 89%, 90%, 91%, 92%, 93%, 94%, 95%, 96%, 97%, 98%, 99%, or 100% identity to SEQ ID NO: 327. In some cases, antibody F2 comprises a constant region comprising at least about 85%, 87%, 88%, 89%, 90%, 91%, 92%, 93%, 94%, 95%, 96%, 97%, 98%, 99%, or 100% identity to SEQ ID NO: 328. In some cases, antibody F2 comprises a constant region comprising at least about 85%, 87%, 88%, 89%, 90%, 91%, 92%, 93%, 94%, 95%, 96%, 97%, 98%, 99%, or 100% identity to SEQ ID NO: 329. In some cases, antibody F2 comprises a constant region comprising at least about 85%, 87%, 88%, 89%, 90%, 91%, 92%, 93%, 94%, 95%, 96%, 97%, 98%, 99%, or 100% identity to SEQ ID NO: 330. In some cases, antibody F2 comprises a constant region comprising at least about 85%, 87%, 88%, 89%, 90%, 91%, 92%, 93%, 94%, 95%, 96%, 97%, 98%, 99%, or 100% identity to SEQ ID NO: 331. In some cases, antibody F2 comprises a constant region comprising at least about 85%, 87%, 88%, 89%, 90%, 91%, 92%, 93%, 94%, 95%, 96%, 97%, 98%, 99%, or 100% identity to SEQ ID NO: 332. In some cases, antibody F2 comprises a constant region comprising at least about 85%, 87%, 88%, 89%, 90%, 91%, 92%, 93%, 94%, 95%, 96%, 97%, 98%, 99%, or 100% identity to SEQ ID NO: 333. In some cases, antibody F2 comprises a constant region comprising at least about 85%, 87%, 88%, 89%, 90%, 91%, 92%, 93%, 94%, 95%, 96%, 97%, 98%, 99%, or 100% identity to SEQ ID NO: 334. In some cases, antibody F2 comprises a constant region comprising at least about 85%, 87%, 88%, 89%, 90%, 91%, 92%, 93%, 94%, 95%, 96%, 97%, 98% 99% or 100% identity to SEQ ID NO: 335. In some cases, antibody F2 comprises a constant region comprising at least about 85%, 87%, 88%, 89%, 90%, 91%, 92%, 93%, 94%, 95%, 96%, 97%, 98%, 99%, or 100% identity to SEQ ID NO: 336. In some cases, antibody F2 comprises a constant region comprising at least about 85%, 87%, 88%, 89%, 90%, 91%, 92%, 93%, 94%, 95%, 96%, 97%, 98%, 99%, or 100% identity to SEQ ID NO: 337. In some cases, antibody F2 comprises a constant region comprising at least about 85%, 87%, 88%, 89%, 90%, 91%, 92%, 93%, 94%, 95%, 96%, 97%, 98%, 99%, or 100% identity to SEQ ID NO: 338. In some cases, antibody F2 comprises a constant region comprising at least about 85%, 87%, 88%, 89%, 90%, 91%, 92%, 93%, 94%, 95%, 96%, 97%, 98%, 99%, or 100% identity to SEQ ID NO: 339. In some cases, antibody F2 comprises a constant region comprising at least about 85%, 87%, 88%, 89%, 90%, 91%, 92%, 93%, 94%, 95%, 96%, 97%, 98%, 99%, or 100% identity to SEQ ID NO: 340. In some cases, antibody F2 comprises a constant region comprising at least about 85%, 87%, 88%, 89%, 90%, 91%, 92%, 93%, 94%, 95%, 96%, 97%, 98%, 99%, or 100% identity to SEQ ID NO: 341. In some cases, antibody F2 comprises a constant region comprising at least about 85%, 87%, 88%, 89%, 90%, 91%, 92%, 93%, 94%, 95%, 96%, 97%, 98%, 99%, or 100% identity to SEQ ID NO: 342. In some cases, antibody F2 comprises a constant region comprising at least about 85%, 87%, 88%, 89%, 90%, 91%, 92%, 93%, 94%, 95%, 96%, 97%, 98%, 99%, or 100% identity to SEQ ID NO: 343. In some cases, antibody F2 comprises a constant region comprising at least about 85%, 87%, 88%, 89%, 90%, 91%, 92%, 93%, 94%, 95%, 96%, 97%, 98% 99% or 100% identity to SEQ ID NO: 344. In some cases, antibody F2 comprises a constant region comprising at least about 85%, 87%, 88%, 89%, 90%, 91%, 92%, 93%, 94%, 95%, 96%, 97%, 98%, 99%, or 100% identity to SEQ ID NO: 345. In some cases, antibody F2 comprises a constant region comprising at least about 85%, 87%, 88%, 89%, 90%, 91%, 92%, 93%, 94%, 95%, 96%, 97%, 98%, 99%, or 100% identity to SEQ ID NO: 346. In some cases, antibody F2 comprises a constant region comprising at least about 85%, 87%, 88%, 89%, 90%, 91%, 92%, 93%, 94%, 95%, 96%, 97%, 98%, 99%, or 100% identity to SEQ ID NO: 347. In some cases, antibody F2 comprises a constant region comprising at least about 85%, 87%, 88%, 89%, 90%, 91%, 92%, 93%, 94%, 95%, 96%, 97%, 98%, 99%, or 100% identity to SEQ ID NO: 348. In some cases, antibody F2 comprises a constant region comprising at least about 85%, 87%, 88%, 89%, 90%, 91%, 92%, 93%, 94%, 95%, 96%, 97%, 98%, 99%, or 100% identity to SEQ ID NO: 349. In some cases, antibody F2 comprises a constant region comprising at least about 85%, 87%, 88%, 89%, 90%, 91%, 92%, 93%, 94%, 95%, 96%, 97%, 98%, 99%, or 100% identity to SEQ ID NO: 350. In some cases, antibody F2 comprises a constant region comprising at least about 85%, 87%, 88%, 89%, 90%, 91%, 92%, 93%, 94%, 95%, 96%, 97%, 98%, 99%, or 100% identity to SEQ ID NO: 351. In some cases, antibody F2 comprises a constant region comprising at least about 85%, 87%, 88%, 89%, 90%, 91%, 92%, 93%, 94%, 95%, 96%, 97%, 98%, 99%, or 100% identity to SEQ ID NO: 352. In some cases, antibody F2 comprises a constant region comprising at least about 85%, 87%, 88%, 89%, 90%, 91%, 92%, 93%, 94%, 95%, 96%, 97%, 98% 99% or 100% identity to SEQ ID NO: 353. In some cases, antibody F2 comprises a constant region comprising at least about 85%, 87%, 88%, 89%, 90%, 91%, 92%, 93%, 94%, 95%, 96%, 97%, 98%, 99%, or 100% identity to SEQ ID NO: 354. In some cases, antibody F2 comprises a constant region comprising at least about 85%, 87%, 88%, 89%, 90%, 91%, 92%, 93%, 94%, 95%, 96%, 97%, 98%, 99%, or 100% identity to SEQ ID NO: 355. In some cases, antibody F2 comprises a constant region comprising at least about 85%, 87%, 88%, 89%, 90%, 91%, 92%, 93%, 94%, 95%, 96%, 97%, 98%, 99%, or 100% identity to SEQ ID NO: 356. In some cases, antibody F2 comprises a constant region comprising at least about 85%, 87%, 88%, 89%, 90%, 91%, 92%, 93%, 94%, 95%, 96%, 97%, 98%, 99%, or 100% identity to SEQ ID NO: 357. In some cases, antibody F2 comprises a constant region comprising at least about 85%, 87%, 88%, 89%, 90%, 91%, 92%, 93%, 94%, 95%, 96%, 97%, 98%, 99%, or 100% identity to SEQ ID NO: 358. In some cases, antibody F2 comprises a constant region comprising at least about 85%, 87%, 88%, 89%, 90%, 91%, 92%, 93%, 94%, 95%, 96%, 97%, 98%, 99%, or 100% identity to SEQ ID NO: 359. In some cases, antibody F2 comprises a constant region comprising at least about 85%, 87%, 88%, 89%, 90%, 91%, 92%, 93%, 94%, 95%, 96%, 97%, 98%, 99%, or 100% identity to SEQ ID NO: 360. In some cases, antibody F2 comprises a constant region comprising at least about 85%, 87%, 88%, 89%, 90%, 91%, 92%, 93%, 94%, 95%, 96%, 97%, 98%, 99%, or 100% identity to SEQ ID NO: 361. In some cases, antibody F2 comprises a constant region comprising at least about 85%, 87%, 88%, 89%, 90%, 91%, 92%, 93%, 94%, 95%, 96%, 97%, 98% 99% or 100% identity to SEQ ID NO: 362. In some cases, antibody F2 comprises at least about 80%, 81%, 82%, 83%, 84%, 85%, 85%, 87%, 88%, 89%, 90%, 91%, 92%, 93%, 94%, 95%, 96%, 97%, 98%, 99%, or 100% monomeric fraction as measured by the size exclusion method described in Example 2. In some cases, antibody F2 is expressed from FreeStyle 293F cells at an expression level of about or at least about 2, 3, 4, 5, 6, 7, 8, 9, 10, 11, 12, 13, 14, 15, 16, 17, 18, 19, 20, 21, 22, 23, 24, 25, 26, 27, 28, 29, 30, 31, 32, 33, 34, 35, 36, 37, 38, 39, 40, 41, 42, 43, 44, 45, 46, 47, 48, 49, 50, 51, 52, 53, 54, 55, 5, 57, 58, 59 or 60 μg/mL as determined by the method described in Example 2. In some cases, antibody F2 is expressed from FreeStyle 293-F cells at an expression level of between about 2 μg/mL to about 60 μg/mL. In some cases, antibody F2 is expressed from FreeStyle 293-F cells at an expression level of between about 10 μg/mL to about 60 μg/mL.

[1064] In some embodiments, an anti-TL1A antibody comprises antibody G2. As used herein, antibody G2 comprises the CDRs of antibody G2 in Table 20. In some cases, antibody G2 comprises a heavy chain framework comprising SEQ ID NO: 302 (X1VQLVQSGAEVKKPGASVKVSCKAS[HCDR 1]WVX2QX3PGQGLEWX4G[HCDR2]RX5TX6TX7DTSTSTX8YX9ELSSLRSEDTAVYYC[HCDR3]WGQGTTVTVSS), wherein X1=Q or E, X2=R or K, X3=A or R, X4=M or I, X5=V or A, X6=M or I, X7=R or T, X8=V or A, and X9=M or L. In some cases, antibody G2 comprises a light chain framework comprising SEQ ID NO: 303 (EIVLTQSPGTLSLSPGERATLSC[LCDR 1]WYQQKPGQAPRX10X11IY[LCDR2]GIPDR FSGSGSGTDFTLTISRLEPEDFAVYYC[LCDR3]FGGGTKLEIK), wherein X10=L or P and X11=L or W. In some cases, antibody G2 comprises a heavy chain variable region comprising human IGHV1-46*02 framework or a modified human IGHV1-46*02 framework, wherein the modified human IGHV1-46*02 framework has less than or equal to about 1, 2, 3, 4, 5, 6, 7, 8, 9, 10, 11, 12, 13, 14, 15, 16, 17, 18, 19, or 20 amino acid substitutions in the framework. In some cases, antibody G2 comprises a light chain variable region comprising human IGKV3-20 framework or a modified human IGKV3-20 framework, wherein the modified human IGKV3-20 framework has less than or equal to about 1, 2, 3, 4, 5, 6, 7, 8, 9, 10, 11, 12, 13, 14, 15, 16, 17, 18, 19, or 20 amino acid substitutions in the framework. In some cases, antibody G2 comprises a constant region comprising reduced ADCC and/or CDC as compared to IgG1. For instance, antibody G2 comprises a human IgG1 Fc region comprising (a) 297A, 297Q, 297G, or 297D, (b) 279F, 279K, or 279L, (c) 228P, (d) 235A, 235E, 235G, 235Q, 235R, or 235S, (e) 237A, 237E, 237K, 237N, or 237R, (f) 234A, 234V, or 234F, (g) 233P, (h) 328A, (i) 327Q or 327T, (j) 329A, 329G, 329Y, or 329R (k) 331S, (1) 236F or 236R, (m) 238A, 238E, 238G, 238H, 238I, 238V, 238 W, or 238Y, (n) 248A, (o) 254D, 254E, 254G, 254H, 254I, 254N, 254P, 254Q, 254T, or 254V, (p) 255N, (q) 256H, 256K, 256R, or 256V, (r) 264S, (s) 265H, 265K, 265S, 265Y, or 265A, (t) 267G, 267H, 267I, or 267K, (u) 268K, (v) 269N or 269Q, (w) 270A, 270G, 270M, or 270N, (x) 271T, (y) 272N, (z) 292E, 292F, 292G, or 292I, (aa) 293S, (bb) 301 W, (cc) 304E, (dd) 311E, 311G, or 311S, (ee) 316F, (ff) 328V, (gg) 330R, (hh) 339E or 339L, (ii) 343I or 343V, (jj) 373A, 373G, or 373S, (kk) 376E, 376 W, or 376Y, (11) 380D, (mm) 382D or 382P, (nn) 385P, (oo) 424H, 424M, or 424V, (pp) 434I, (qq) 438G, (rr) 439E, 439H, or 439Q, (ss) 440A, 440D, 440E, 440F, 440M, 440T, or 440V, (tt) E233P, (uu) L235E, (vv) L234A and L235A, (ww) L234A, L235A, and G237A, (xx) L234A, L235A, and P329G, (yy) L234F, L235E, and P331 S, (zz) L234A, L235E, and G237A, (aaa), L234A, L235E, G237A, and P331 S (bbb) L234A, L235A, G237A, P238 S, H268A, A330 S, and P331 S (IgG1σ, (ccc) L234A, L235A, and P329A, (ddd) G236R and L328R, (eee) G237A, (fff) F241A, (ggg) V264A, (hhh) D265A, (iii) D265A and N297A, (jjj) D265A and N297G, (kkk) D270A, (111) A330L, (mmm) P331A or P331 S, or (nnn) any combination of (a)-(uu), per Kabat numbering. In some cases, antibody G2 comprises a constant region comprising at least about 85%, 87%, 88%, 89%, 90%, 91%, 92%, 93%, 94%, 95%, 96%, 97%, 98%, 99%, or 100% identity to SEQ ID NO: 320. In some cases, antibody G2 comprises a constant region comprising at least about 85%, 87%, 88%, 89%, 90%, 91%, 92%, 93%, 94%, 95%, 96%, 97%, 98%, 99%, or 100% identity to SEQ ID NO: 321. In some cases, antibody G2 comprises a constant region comprising at least about 85%, 87%, 88%, 89%, 90%, 91%, 92%, 93%, 94%, 95%, 96%, 97%, 98%, 99%, or 100% identity to SEQ ID NO: 322. In some cases, antibody G2 comprises a constant region comprising at least about 85%, 87%, 88%, 89%, 90%, 91%, 92%, 93%, 94%, 95%, 96%, 97%, 98%, 99%, or 100% identity to SEQ ID NO: 323. In some cases, antibody G2 comprises a constant region comprising at least about 85%, 87%, 88%, 89%, 90%, 91%, 92%, 93%, 94%, 95%, 96%, 97%, 98%, 99%, or 100% identity to SEQ ID NO: 324. In some cases, antibody G2 comprises a constant region comprising at least about 85%, 87%, 88%, 89%, 90%, 91%, 92%, 93%, 94%, 95%, 96%, 97%, 98%, 99%, or 100% identity to SEQ ID NO: 325. In some cases, antibody G2 comprises a constant region comprising at least about 85%, 87%, 88%, 89%, 90%, 91%, 92%, 93%, 94%, 95%, 96%, 97%, 98%, 99%, or 100% identity to SEQ ID NO: 326. In some cases, antibody G2 comprises a constant region comprising at least about 85%, 87%, 88%, 89%, 90%, 91%, 92%, 93%, 94%, 95%, 96%, 97%, 98%, 99%, or 100% identity to SEQ ID NO: 327. In some cases, antibody G2 comprises a constant region comprising at least about 85%, 87%, 88%, 89%, 90%, 91%, 92%, 93%, 94%, 95%, 96%, 97%, 98%, 99%, or 100% identity to SEQ ID NO: 328. In some cases, antibody G2 comprises a constant region comprising at least about 85%, 87%, 88%, 89%, 90%, 91%, 92%, 93%, 94%, 95%, 96%, 97%, 98%, 99%, or 100% identity to SEQ ID NO: 329. In some cases, antibody G2 comprises a constant region comprising at least about 85%, 87%, 88%, 89%, 90%, 91%, 92%, 93%, 94%, 95%, 96%, 97%, 98%, 99%, or 100% identity to SEQ ID NO: 330. In some cases, antibody G2 comprises a constant region comprising at least about 85%, 87%, 88%, 89%, 90%, 91%, 92%, 93%, 94%, 95%, 96%, 97%, 98%, 99%, or 100% identity to SEQ ID NO: 331. In some cases, antibody G2 comprises a constant region comprising at least about 85%, 87%, 88%, 89%, 90%, 91%, 92%, 93%, 94%, 95%, 96%, 97%, 98%, 99%, or 100% identity to SEQ ID NO: 332. In some cases, antibody G2 comprises a constant region comprising at least about 85%, 87%, 88%, 89%, 90%, 91%, 92%, 93%, 94%, 95%, 96%, 97%, 98%, 99%, or 100% identity to SEQ ID NO: 333. In some cases, antibody G2 comprises a constant region comprising at least about 85%, 87%, 88%, 89%, 90%, 91%, 92%, 93%, 94%, 95%, 96%, 97%, 98%, 99%, or 100% identity to SEQ ID NO: 334. In some cases, antibody G2 comprises a constant region comprising at least about 85%, 87%, 88%, 89%, 90%, 91%, 92%, 93%, 94%, 95%, 96%, 97%, 98%, 99%, or 100% identity to SEQ ID NO: 335. In some cases, antibody G2 comprises a constant region comprising at least about 85%, 87%, 88%, 89%, 90%, 91%, 92%, 93%, 94%, 95%, 96%, 97%, 98%, 99%, or 100% identity to SEQ ID NO: 336. In some cases, antibody G2 comprises a constant region comprising at least about 85%, 87%, 88%, 89%, 90%, 91%, 92%, 93%, 94%, 95%, 96%, 97%, 98%, 99%, or 100% identity to SEQ ID NO: 337. In some cases, antibody G2 comprises a constant region comprising at least about 85%, 87%, 88%, 89%, 90%, 91%, 92%, 93%, 94%, 95%, 96%, 97%, 98%, 99%, or 100% identity to SEQ ID NO: 338. In some cases, antibody G2 comprises a constant region comprising at least about 85%, 87%, 88%, 89%, 90%, 91%, 92%, 93%, 94%, 95%, 96%, 97%, 98%, 99%, or 100% identity to SEQ ID NO: 339. In some cases, antibody G2 comprises a constant region comprising at least about 85%, 87%, 88%, 89%, 90%, 91%, 92%, 93%, 94%, 95%, 96%, 97%, 98%, 99%, or 100% identity to SEQ ID NO: 340. In some cases, antibody G2 comprises a constant region comprising at least about 85%, 87%, 88%, 89%, 90%, 91%, 92%, 93%, 94%, 95%, 96%, 97%, 98%, 99%, or 100% identity to SEQ ID NO: 341. In some cases, antibody G2 comprises a constant region comprising at least about 85%, 87%, 88%, 89%, 90%, 91%, 92%, 93%, 94%, 95%, 96%, 97%, 98%, 99%, or 100% identity to SEQ ID NO: 342. In some cases, antibody G2 comprises a constant region comprising at least about 85%, 87%, 88%, 89%, 90%, 91%, 92%, 93%, 94%, 95%, 96%, 97%, 98%, 99%, or 100% identity to SEQ ID NO: 343. In some cases, antibody G2 comprises a constant region comprising at least about 85%, 87%, 88%, 89%, 90%, 91%, 92%, 93%, 94%, 95%, 96%, 97%, 98%, 99%, or 100% identity to SEQ ID NO: 344. In some cases, antibody G2 comprises a constant region comprising at least about 85%, 87%, 88%, 89%, 90%, 91%, 92%, 93%, 94%, 95%, 96%, 97%, 98%, 99%, or 100% identity to SEQ ID NO: 345. In some cases, antibody G2 comprises a constant region comprising at least about 85%, 87%, 88%, 89%, 90%, 91%, 92%, 93%, 94%, 95%, 96%, 97%, 98%, 99%, or 100% identity to SEQ ID NO: 346. In some cases, antibody G2 comprises a constant region comprising at least about 85%, 87%, 88%, 89%, 90%, 91%, 92%, 93%, 94%, 95%, 96%, 97%, 98%, 99%, or 100% identity to SEQ ID NO: 347. In some cases, antibody G2 comprises a constant region comprising at least about 85%, 87%, 88%, 89%, 90%, 91%, 92%, 93%, 94%, 95%, 96%, 97%, 98%, 99%, or 100% identity to SEQ ID NO: 348. In some cases, antibody G2 comprises a constant region comprising at least about 85%, 87%, 88%, 89%, 90%, 91%, 92%, 93%, 94%, 95%, 96%, 97%, 98%, 99%, or 100% identity to SEQ ID NO: 349. In some cases, antibody G2 comprises a constant region comprising at least about 85%, 87%, 88%, 89%, 90%, 91%, 92%, 93%, 94%, 95%, 96%, 97%, 98%, 99%, or 100% identity to SEQ ID NO: 350. In some cases, antibody G2 comprises a constant region comprising at least about 85%, 87%, 88%, 89%, 90%, 91%, 92%, 93%, 94%, 95%, 96%, 97%, 98%, 99%, or 100% identity to SEQ ID NO: 351. In some cases, antibody G2 comprises a constant region comprising at least about 85%, 87%, 88%, 89%, 90%, 91%, 92%, 93%, 94%, 95%, 96%, 97%, 98%, 99%, or 100% identity to SEQ ID NO: 352. In some cases, antibody G2 comprises a constant region comprising at least about 85%, 87%, 88%, 89%, 90%, 91%, 92%, 93%, 94%, 95%, 96%, 97%, 98%, 99%, or 100% identity to SEQ ID NO: 353. In some cases, antibody G2 comprises a constant region comprising at least about 85%, 87%, 88%, 89%, 90%, 91%, 92%, 93%, 94%, 95%, 96%, 97%, 98%, 99%, or 100% identity to SEQ ID NO: 354. In some cases, antibody G2 comprises a constant region comprising at least about 85%, 87%, 88%, 89%, 90%, 91%, 92%, 93%, 94%, 95%, 96%, 97%, 98%, 99%, or 100% identity to SEQ ID NO: 355. In some cases, antibody G2 comprises a constant region comprising at least about 85%, 87%, 88%, 89%, 90%, 91%, 92%, 93%, 94%, 95%, 96%, 97%, 98%, 99%, or 100% identity to SEQ ID NO: 356. In some cases, antibody G2 comprises a constant region comprising at least about 85%, 87%, 88%, 89%, 90%, 91%, 92%, 93%, 94%, 95%, 96%, 97%, 98%, 99%, or 100% identity to SEQ ID NO: 357. In some cases, antibody G2 comprises a constant region comprising at least about 85%, 87%, 88%, 89%, 90%, 91%, 92%, 93%, 94%, 95%, 96%, 97%, 98%, 99%, or 100% identity to SEQ ID NO: 358. In some cases, antibody G2 comprises a constant region comprising at least about 85%, 87%, 88%, 89%, 90%, 91%, 92%, 93%, 94%, 95%, 96%, 97%, 98%, 99%, or 100% identity to SEQ ID NO: 359. In some cases, antibody G2 comprises a constant region comprising at least about 85%, 87%, 88%, 89%, 90%, 91%, 92%, 93%, 94%, 95%, 96%, 97%, 98%, 99%, or 100% identity to SEQ ID NO: 360. In some cases, antibody G2 comprises a constant region comprising at least about 85%, 87%, 88%, 89%, 90%, 91%, 92%, 93%, 94%, 95%, 96%, 97%, 98%, 99%, or 100% identity to SEQ ID NO: 361. In some cases, antibody G2 comprises a constant region comprising at least about 85%, 87%, 88%, 89%, 90%, 91%, 92%, 93%, 94%, 95%, 96%, 97%, 98%, 99%, or 100% identity to SEQ ID NO: 362. In some cases, antibody G2 comprises at least about 80%, 81%, 82%, 83%, 84%, 85%, 85%, 87%, 88%, 89%, 90%, 91%, 92%, 93%, 94%, 95%, 96%, 97%, 98%, 99%, or 100% monomeric fraction as measured by the size exclusion method described in Example 2. In some cases, antibody G2 is expressed from FreeStyle 293-F cells at an expression level of about or at least about 2, 3, 4, 5, 6, 7, 8, 9, 10, 11, 12, 13, 14, 15, 16, 17, 18, 19, 20, 21, 22, 23, 24, 25, 26, 27, 28, 29, 30, 31, 32, 33, 34, 35, 36, 37, 38, 39, 40, 41, 42, 43, 44, 45, 46, 47, 48, 49, 50, 51, 52, 53, 54, 55, 5, 57, 58, 59 or 60 μg/mL as determined by the method described in Example 2. In some cases, antibody G2 is expressed from FreeStyle 293-F cells at an expression level of between about 2 μg/mL to about 60 μg/mL. In some cases, antibody G2 is expressed from FreeStyle 293-F cells at an expression level of between about 10 μg/mL to about 60 μg/mL.

[1065] In some embodiments, an anti-TL1A antibody comprises antibody H2. As used herein, antibody H2 comprises the CDRs of antibody H2 in Table 20. In some cases, antibody H2 comprises a heavy chain framework comprising SEQ ID NO: 302 (X1VQLVQSGAEVKKPGASVKVSCKAS[HCDR1]WVX2QX3PGQGLEWX4G[HCDR2]RX5TX6TX7DTSTSTX8YX9ELSSLRSEDTAVYYC[HCDR3]WGQGTTVTVSS), wherein X1=Q or E, X2=R or K, X3=A or R, X4=M or I, X5=V or A, X6=M or I, X7=R or T, X8=V or A, and X9=M or L. In some cases, antibody H2 comprises a light chain framework comprising SEQ ID NO: 303 (EIVLTQSPGTLSLSPGERATLSC[LCDR 1]WYQQKPGQAPRX10X11IY[LCDR2]GIPDR FSGSGSGTDFTLTISRLEPEDFAVYYC[LCDR3]FGGGTKLEIK), wherein X10=L or P and X11=L or W. In some cases, antibody H2 comprises a heavy chain variable region comprising human IGHV1-46*02 framework or a modified human IGHV1-46*02 framework, wherein the modified human IGHV1-46*02 framework has less than or equal to about 1, 2, 3, 4, 5, 6, 7, 8, 9, 10, 11, 12, 13, 14, 15, 16, 17, 18, 19, or 20 amino acid substitutions in the framework. In some cases, antibody H2 comprises a light chain variable region comprising human IGKV3-20 framework or a modified human IGKV3-20 framework, wherein the modified human IGKV3-20 framework has less than or equal to about 1, 2, 3, 4, 5, 6, 7, 8, 9, 10, 11, 12, 13, 14, 15, 16, 17, 18, 19, or 20 amino acid substitutions in the framework. In some cases, antibody H2 comprises a constant region comprising reduced ADCC and/or CDC as compared to IgG1. For instance, antibody H2 comprises a human IgG1 Fc region comprising (a) 297A, 297Q, 297G, or 297D, (b) 279F, 279K, or 279L, (c) 228P, (d) 235A, 235E, 235G, 235Q, 235R, or 235S, (e) 237A, 237E, 237K, 237N, or 237R, (f) 234A, 234V, or 234F, (g) 233P, (h) 328A, (i) 327Q or 327T, (j) 329A, 329G, 329Y, or 329R (k) 331S, (1) 236F or 236R, (m) 238A, 238E, 238G, 238H, 238I, 238V, 238 W, or 238Y, (n) 248A, (o) 254D, 254E, 254G, 254H, 254I, 254N, 254P, 254Q, 254T, or 254V, (p) 255N, (q) 256H, 256K, 256R, or 256V, (r) 264S, (s) 265H, 265K, 265S, 265Y, or 265A, (t) 267G, 267H, 267I, or 267K, (u) 268K, (v) 269N or 269Q, (w) 270A, 270G, 270M, or 270N, (x) 271T, (y) 272N, (z) 292E, 292F, 292G, or 292I, (aa) 293S, (bb) 301 W, (cc) 304E, (dd) 311E, 311G, or 311S, (ee) 316F, (ff) 328V, (gg) 330R, (hh) 339E or 339L, (ii) 343I or 343V, (jj) 373A, 373G, or 373S, (kk) 376E, 376 W, or 376Y, (11) 380D, (mm) 382D or 382P, (nn) 385P, (oo) 424H, 424M, or 424V, (pp) 434I, (qq) 438G, (rr) 439E, 439H, or 439Q, (ss) 440A, 440D, 440E, 440F, 440M, 440T, or 440V, (tt) E233P, (uu) L235E, (vv) L234A and L235A, (ww) L234A, L235A, and G237A, (xx) L234A, L235A, and P329G, (yy) L234F, L235E, and P331 S, (zz) L234A, L235E, and G237A, (aaa), L234A, L235E, G237A, and P331 S (bbb) L234A, L235A, G237A, P238 S, H268A, A330 S, and P331 S (IgG1σ, (ccc) L234A, L235A, and P329A, (ddd) G236R and L328R, (eee) G237A, (fff) F241A, (ggg) V264A, (hhh) D265A, (iii) D265A and N297A, (jjj) D265A and N297G, (kkk) D270A, (111) A330L, (mmm) P331A or P331 S, or (nnn) any combination of (a)-(uu), per Kabat numbering. In some cases, antibody H2 comprises a constant region comprising at least about 85%, 87%, 88%, 89%, 90%, 91%, 92%, 93%, 94%, 95%, 96%, 97%, 98%, 99%, or 100% identity to SEQ ID NO: 320. In some cases, antibody H2 comprises a constant region comprising at least about 85%, 87%, 88%, 89%, 90%, 91%, 92%, 93%, 94%, 95%, 96%, 97%, 98%, 99%, or 100% identity to SEQ ID NO: 321. In some cases, antibody H2 comprises a constant region comprising at least about 85%, 87%, 88%, 89%, 90%, 91%, 92%, 93%, 94%, 95%, 96%, 97%, 98%, 99%, or 100% identity to SEQ ID NO: 322. In some cases, antibody H2 comprises a constant region comprising at least about 85%, 87%, 88%, 89%, 90%, 91%, 92%, 93%, 94%, 95%, 96%, 97%, 98%, 99%, or 100% identity to SEQ ID NO: 323. In some cases, antibody H2 comprises a constant region comprising at least about 85%, 87%, 88%, 89%, 90%, 91%, 92%, 93%, 94%, 95%, 96%, 97%, 98%, 99%, or 100% identity to SEQ ID NO: 324. In some cases, antibody H2 comprises a constant region comprising at least about 85%, 87%, 88%, 89%, 90%, 91%, 92%, 93%, 94%, 95%, 96%, 97%, 98%, 99%, or 100% identity to SEQ ID NO: 325. In some cases, antibody H2 comprises a constant region comprising at least about 85%, 87%, 88%, 89%, 90%, 91%, 92%, 93%, 94%, 95%, 96%, 97%, 98%, 99%, or 100% identity to SEQ ID NO: 326. In some cases, antibody H2 comprises a constant region comprising at least about 85%, 87%, 88%, 89%, 90%, 91%, 92%, 93%, 94%, 95%, 96%, 97%, 98%, 99%, or 100% identity to SEQ ID NO: 327. In some cases, antibody H2 comprises a constant region comprising at least about 85%, 87%, 88%, 89%, 90%, 91%, 92%, 93%, 94%, 95%, 96%, 97%, 98%, 99%, or 100% identity to SEQ ID NO: 328. In some cases, antibody H2 comprises a constant region comprising at least about 85%, 87%, 88%, 89%, 90%, 91%, 92%, 93%, 94%, 95%, 96%, 97%, 98%, 99%, or 100% identity to SEQ ID NO: 329. In some cases, antibody H2 comprises a constant region comprising at least about 85%, 87%, 88%, 89%, 90%, 91%, 92%, 93%, 94%, 95%, 96%, 97%, 98%, 99%, or 100% identity to SEQ ID NO: 330. In some cases, antibody H2 comprises a constant region comprising at least about 85%, 87%, 88%, 89%, 90%, 91%, 92%, 93%, 94%, 95%, 96%, 97%, 98%, 99%, or 100% identity to SEQ ID NO: 331. In some cases, antibody H2 comprises a constant region comprising at least about 85%, 87%, 88%, 89%, 90%, 91%, 92%, 93%, 94%, 95%, 96%, 97%, 98%, 99%, or 100% identity to SEQ ID NO: 332. In some cases, antibody H2 comprises a constant region comprising at least about 85%, 87%, 88%, 89%, 90%, 91%, 92%, 93%, 94%, 95%, 96%, 97%, 98%, 99%, or 100% identity to SEQ ID NO: 333. In some cases, antibody H2 comprises a constant region comprising at least about 85%, 87%, 88%, 89%, 90%, 91%, 92%, 93%, 94%, 95%, 96%, 97%, 98%, 99%, or 100% identity to SEQ ID NO: 334. In some cases, antibody H2 comprises a constant region comprising at least about 85%, 87%, 88%, 89%, 90%, 91%, 92%, 93%, 94%, 95%, 96%, 97%, 98%, 99%, or 100% identity to SEQ ID NO: 335. In some cases, antibody H2 comprises a constant region comprising at least about 85%, 87%, 88%, 89%, 90%, 91%, 92%, 93%, 94%, 95%, 96%, 97%, 98%, 99%, or 100% identity to SEQ ID NO: 336. In some cases, antibody H2 comprises a constant region comprising at least about 85%, 87%, 88%, 89%, 90%, 91%, 92%, 93%, 94%, 95%, 96%, 97%, 98%, 99%, or 100% identity to SEQ ID NO: 337. In some cases, antibody H2 comprises a constant region comprising at least about 85%, 87%, 88%, 89%, 90%, 91%, 92%, 93%, 94%, 95%, 96%, 97%, 98%, 99%, or 100% identity to SEQ ID NO: 338. In some cases, antibody H2 comprises a constant region comprising at least about 85%, 87%, 88%, 89%, 90%, 91%, 92%, 93%, 94%, 95%, 96%, 97%, 98%, 99%, or 100% identity to SEQ ID NO: 339. In some cases, antibody H2 comprises a constant region comprising at least about 85%, 87%, 88%, 89%, 90%, 91%, 92%, 93%, 94%, 95%, 96%, 97%, 98%, 99%, or 100% identity to SEQ ID NO: 340. In some cases, antibody H2 comprises a constant region comprising at least about 85%, 87%, 88%, 89%, 90%, 91%, 92%, 93%, 94%, 95%, 96%, 97%, 98%, 99%, or 100% identity to SEQ ID NO: 341. In some cases, antibody H2 comprises a constant region comprising at least about 85%, 87%, 88%, 89%, 90%, 91%, 92%, 93%, 94%, 95%, 96%, 97%, 98%, 99%, or 100% identity to SEQ ID NO: 342. In some cases, antibody H2 comprises a constant region comprising at least about 85%, 87%, 88%, 89%, 90%, 91%, 92%, 93%, 94%, 95%, 96%, 97%, 98%, 99%, or 100% identity to SEQ ID NO: 343. In some cases, antibody H2 comprises a constant region comprising at least about 85%, 87%, 88%, 89%, 90%, 91%, 92%, 93%, 94%, 95%, 96%, 97%, 98%, 99%, or 100% identity to SEQ ID NO: 344. In some cases, antibody H2 comprises a constant region comprising at least about 85%, 87%, 88%, 89%, 90%, 91%, 92%, 93%, 94%, 95%, 96%, 97%, 98%, 99%, or 100% identity to SEQ ID NO: 345. In some cases, antibody H2 comprises a constant region comprising at least about 85%, 87%, 88%, 89%, 90%, 91%, 92%, 93%, 94%, 95%, 96%, 97%, 98%, 99%, or 100% identity to SEQ ID NO: 346. In some cases, antibody H2 comprises a constant region comprising at least about 85%, 87%, 88%, 89%, 90%, 91%, 92%, 93%, 94%, 95%, 96%, 97%, 98%, 99%, or 100% identity to SEQ ID NO: 347. In some cases, antibody H2 comprises a constant region comprising at least about 85%, 87%, 88%, 89%, 90%, 91%, 92%, 93%, 94%, 95%, 96%, 97%, 98%, 99%, or 100% identity to SEQ ID NO: 348. In some cases, antibody H2 comprises a constant region comprising at least about 85%, 87%, 88%, 89%, 90%, 91%, 92%, 93%, 94%, 95%, 96%, 97%, 98%, 99%, or 100% identity to SEQ ID NO: 349. In some cases, antibody H2 comprises a constant region comprising at least about 85%, 87%, 88%, 89%, 90%, 91%, 92%, 93%, 94%, 95%, 96%, 97%, 98%, 99%, or 100% identity to SEQ ID NO: 350. In some cases, antibody H2 comprises a constant region comprising at least about 85%, 87%, 88%, 89%, 90%, 91%, 92%, 93%, 94%, 95%, 96%, 97%, 98%, 99%, or 100% identity to SEQ ID NO: 351. In some cases, antibody H2 comprises a constant region comprising at least about 85%, 87%, 88%, 89%, 90%, 91%, 92%, 93%, 94%, 95%, 96%, 97%, 98%, 99%, or 100% identity to SEQ ID NO: 352. In some cases, antibody H2 comprises a constant region comprising at least about 85%, 87%, 88%, 89%, 90%, 91%, 92%, 93%, 94%, 95%, 96%, 97%, 98%, 99%, or 100% identity to SEQ ID NO: 353. In some cases, antibody H2 comprises a constant region comprising at least about 85%, 87%, 88%, 89%, 90%, 91%, 92%, 93%, 94%, 95%, 96%, 97%, 98%, 99%, or 100% identity to SEQ ID NO: 354. In some cases, antibody H2 comprises a constant region comprising at least about 85%, 87%, 88%, 89%, 90%, 91%, 92%, 93%, 94%, 95%, 96%, 97%, 98%, 99%, or 100% identity to SEQ ID NO: 355. In some cases, antibody H2 comprises a constant region comprising at least about 85%, 87%, 88%, 89%, 90%, 91%, 92%, 93%, 94%, 95%, 96%, 97%, 98%, 99%, or 100% identity to SEQ ID NO: 356. In some cases, antibody H2 comprises a constant region comprising at least about 85%, 87%, 88%, 89%, 90%, 91%, 92%, 93%, 94%, 95%, 96%, 97%, 98%, 99%, or 100% identity to SEQ ID NO: 357. In some cases, antibody H2 comprises a constant region comprising at least about 85%, 87%, 88%, 89%, 90%, 91%, 92%, 93%, 94%, 95%, 96%, 97%, 98%, 99%, or 100% identity to SEQ ID NO: 358. In some cases, antibody H2 comprises a constant region comprising at least about 85%, 87%, 88%, 89%, 90%, 91%, 92%, 93%, 94%, 95%, 96%, 97%, 98%, 99%, or 100% identity to SEQ ID NO: 359. In some cases, antibody H2 comprises a constant region comprising at least about 85%, 87%, 88%, 89%, 90%, 91%, 92%, 93%, 94%, 95%, 96%, 97%, 98%, 99%, or 100% identity to SEQ ID NO: 360. In some cases, antibody H2 comprises a constant region comprising at least about 85%, 87%, 88%, 89%, 90%, 91%, 92%, 93%, 94%, 95%, 96%, 97%, 98%, 99%, or 100% identity to SEQ ID NO: 361. In some cases, antibody H2 comprises a constant region comprising at least about 85%, 87%, 88%, 89%, 90%, 91%, 92%, 93%, 94%, 95%, 96%, 97%, 98%, 99%, or 100% identity to SEQ ID NO: 362. In some cases, antibody H2 comprises at least about 80%, 81%, 82%, 83%, 84%, 85%, 85%, 87%, 88%, 89%, 90%, 91%, 92%, 93%, 94%, 95%, 96%, 97%, 98%, 99%, or 100% monomeric fraction as measured by the size exclusion method described in Example 2. In some cases, antibody H2 is expressed from FreeStyle 293-F cells at an expression level of about or at least about 2, 3, 4, 5, 6, 7, 8, 9, 10, 11, 12, 13, 14, 15, 16, 17, 18, 19, 20, 21, 22, 23, 24, 25, 26, 27, 28, 29, 30, 31, 32, 33, 34, 35, 36, 37, 38, 39, 40, 41, 42, 43, 44, 45, 46, 47, 48, 49, 50, 51, 52, 53, 54, 55, 5, 57, 58, 59 or 60 μg/mL as determined by the method described in Example 2. In some cases, antibody H2 is expressed from FreeStyle 293-F cells at an expression level of between about 2 μg/mL to about 60 μg/mL. In some cases, antibody H2 is expressed from FreeStyle 293-F cells at an expression level of between about 10 μg/mL to about 60 μg/mL.

[1066] The TL1A antibodies described herein bind to specific regions or epitopes of human TL1A demonstrated herein as useful to inhibit interferon gamma secretion from T lymphocytes. Various embodiments provide for an anti-TL1A antibody that binds to the same region of a TL1A protein or portion thereof as a reference antibody such as the anti-TL1A antibodies described herein. In some embodiments, the reference antibody comprises antibody A, B, C, D, E, F, G, H, A2, B2, C2, D2, E2, F2, G2, or H2, or a combination thereof. In some embodiments, provided herein is an anti-TL1A antibody that binds specifically to the same region of TL1A as a reference antibody comprising a heavy chain sequence at least about 90%, 92%, 93%, 94%, 95%, 96%, 97%, 98%, 99% or 100% identical to SEQ ID NO: 104, and a light chain comprising a sequence at least about 90%, 92%, 93%, 94%, 95%, 96%, 97%, 98%, 99% or 100% identical to SEQ ID NO: 201. In some embodiments, provided herein is an anti-TL1A antibody that binds specifically to the same region of TL1A as a reference antibody comprising a heavy chain sequence at least about 90%, 92%, 93%, 94%, 95%, 96%, 97%, 98%, 99% or 100% identical to SEQ ID NO: 107, and a light chain comprising a sequence at least about 90%, 92%, 93%, 94%, 95%, 96%, 97%, 98%, 99% or 100% identical to SEQ ID NO: 201.

[1067] Non-limiting methods for determining whether an anti-TL1A antibody (i.e. test antibody) binds to the same region of a TL1A protein or portion thereof as an antibody described herein are provided. An exemplary embodiment comprises a competition assay. For instance, the method comprises determining whether the test antibody can compete with binding between the reference antibody and the TL1A protein or portion thereof, or determining whether the reference antibody can compete with binding between the test antibody and the TL1A protein or portion thereof. Exemplary methods include use of surface plasmon resonance to evaluate whether an anti-TL1A antibody can compete with the binding between TL1A and another anti-TL1A antibody. In some cases, surface plasmon resonance is utilized in the competition assay. Non-limiting methods are described in the examples.

[1068] In certain embodiments, disclosed herein are antibodies that compete for binding TL1A with the antibodies described herein. In certain embodiments, disclosed herein are antibodies that bind a discrete epitope that overlaps with an epitope of TL1A bound by an antibody described herein. In certain embodiments, disclosed herein are antibodies that bind the same epitope of TL1A, overlap with an epitope of TL1A by one or more amino acid residues, or that compete for binding to an epitope of TL1A with an antibody or fragment thereof that comprises a heavy chain variable region comprising the amino acid sequence of SEQ ID NO: 104; and a light chain variable region comprising the amino acid of SEQ ID NO: 201. In certain embodiments, disclosed herein are antibodies that bind the same epitope of TL1A, overlap with an epitope of TL1A by one or more amino acid residues, or that compete for binding to an epitope of TL1A with an antibody or fragment thereof that comprises a heavy chain variable region comprising the amino acid sequence of SEQ ID NO: 107; and a light chain variable region comprising the amino acid of SEQ ID NO: 201.

### Additional Antibody Embodiments

[1069] In one aspect, provided herein, is an antibody or antigen binding fragment thereof that binds to TL1A, comprising a heavy chain variable framework region comprising a human IGHV1-46*02 framework or a modified human IGHV1-46*02 framework, and a light chain variable framework region comprising a human IGKV3-20 framework or a modified human IGKV3-20 framework; wherein the heavy chain variable framework region and the light chain variable framework region collectively comprise less than 9 amino acid modifications from the human IGHV1-46*02 framework and the human IGKV3-20 framework. In some embodiments, the amino acid modification comprises: (a) a modification at amino acid position 47 in the heavy chain variable region; (b) a modification at amino acid position 45 in the heavy chain variable region; (c) a modification at amino acid position 55 in the heavy chain variable region; (d) a modification at amino acid position 78 in the heavy chain variable region; (e) a modification at amino acid position 80 in the heavy chain variable region; (f) a modification at amino acid position 82 in the heavy chain variable region; (g) a modification at amino acid position 89 in the heavy chain variable region; or (h) a modification at amino acid position 91 in the heavy chain variable region; per Aho or Kabat numbering; or a combination of two or more modifications selected from (a) to (h). In some embodiments, (a) the amino acid modification is at position 47 in the heavy chain variable region, and the amino acid at position 47 is R, N, D, C, Q, E, G, H, I, L, K, M, F, P, S, T, W, Y, or V; (b) the amino acid modification is at position 45 in the heavy chain variable region, and the amino acid at position 45 is A, N, D, C, Q, E, G, H, I, L, K, M, F, P, S, T, W, Y, or V; (c) the amino acid modification is at position 55 in the heavy chain variable region, and the amino acid at position 55 is A, R, N, D, C, Q, E, G, H, I, L, K, F, P, S, T, W, Y, or V; (d) the amino acid modification is at position 78 in the heavy chain variable region, and the amino acid at position 78 is A, R, N, D, C, Q, E, G, H, I, L, K, M, F, P, S, T, W, or Y; (e) the amino acid modification is at position 80 in the heavy chain variable region, and the amino acid at position 80 is A, R, N, D, C, Q, E, G, H, I, L, K, F, P, S, T, W, Y, or V; (f) the amino acid modification is at position 82 in the heavy chain variable region, and the amino acid at position 82 is A, N, D, C, Q, E, G, H, I, L, K, M, F, P, S, T, W, Y, or V; (g) the amino acid modification is at position 89 in the heavy chain variable region, and the amino acid at position 89 is A, R, N, D, C, Q, E, G, H, I, L, K, M, F, P, S, T, W, or Y; or (h) the amino acid modification is at position 91 in the heavy chain variable region, and the amino acid at position 91 is A, R, N, D, C, Q, E, G, H, I, L, K, F, P, S, T, W, Y, or V; or a combination of two or more modifications selected from (a) to (h). In some embodiments, the amino acid modifications comprise one or more of: A47R, R45K, M551, V78A, M80I, R82T, V89A, M91L in the heavy chain variable region, per Aho or Kabat numbering. In some embodiments, the amino acid modification comprises: (a) a modification at amino acid position 54 in the light chain variable region; and/or (b) a modification at amino acid position 55 in the light chain variable region; per Aho or Kabat numbering. In some embodiments, (a) the amino acid modification is at position 54 of the light chain variable region, and the amino acid at position 54 is A, R, N, D, C, Q, E, G, H, I, K, M, F, P, S, T, W, Y, or V; and/or (b) the amino acid modification is at position 55 of the light chain variable region, and the amino acid at position 55 is A, R, N, D, C, Q, E, G, H, I, K, M, F, P, S, T, W, Y, or V. In some embodiments, the amino acid modifications comprise L54P and/or L55W in the light chain variable region, per Aho or Kabat numbering. In some embodiments, the antibody or antigen binding fragment comprises a heavy chain CDR1 as set forth by SEQ ID NO: 1, a heavy chain CDR2 as set forth by any one of SEQ ID NOS: 2-5, a heavy chain CDR3 as set forth by any one of SEQ ID NOS: 6-9, a light chain CDR1 as set forth by SEQ ID NO: 10, a light chain CDR2 as set forth by SEQ ID NO: 11, and a light chain CDR3 as set forth by any one of SEQ ID NOS: 12-15. In some embodiments, the antibody or antigen binding fragment comprises a heavy chain CDR1 as set forth by SEQ ID NO: 1, a heavy chain CDR2 as set forth by SEQ ID NO: 2, a heavy chain CDR3 as set forth by SEQ ID NO: 6, a light chain CDR1 as set forth by SEQ ID NO: 10, a light chain CDR2 as set forth by SEQ ID NO: 11, and a light chain CDR3 as set forth by SEQ ID NO: 12. In some embodiments, the antibody or antigen binding fragment comprises comprising a heavy chain framework (FR) 1 as set forth by SEQ ID NO: 304, a heavy chain FR2 as set forth by SEQ ID NO: 305 or SEQ ID NO: 313, a heavy chain FR3 as set forth by any one of SEQ ID NOS: 306, 307, 314, or 315, a heavy chain FR4 as set forth by SEQ ID NO: 308, a light chain FR1 as set forth by SEQ ID NO: 309, a light chain FR2 as set forth by SEQ ID NO: 310, a light chain FR3 as set forth by SEQ ID NO: 311, or a light chain FR4 as set forth by SEQ ID NO: 312, or a combination thereof. In some embodiments, the antibody or antigen binding fragment comprises a human IgG1 Fc region comprising (a) 297A, 297Q, 297G, or 297D, (b) 279F, 279K, or 279L, (c) 228P, (d) 235A, 235E, 235G, 235Q, 235R, or 235S, (e) 237A, 237E, 237K, 237N, or 237R, (f) 234A, 234V, or 234F, (g) 233P, (h) 328A, (i) 327Q or 327T, (j) 329A, 329G, 329Y, or 329R (k) 331S, (1) 236F or 236R, (m) 238A, 238E, 238G, 238H, 238I, 238V, 238 W, or 238Y, (n) 248A, (o) 254D, 254E, 254G, 254H, 254I, 254N, 254P, 254Q, 254T, or 254V, (p) 255N, (q) 256H, 256K, 256R, or 256V, (r) 264S, (s) 265H, 265K, 265S, 265Y, or 265A, (t) 267G, 267H, 267I, or 267K, (u) 268K, (v) 269N or 269Q, (w) 270A, 270G, 270M, or 270N, (x) 271T, (y) 272N, (z) 292E, 292F, 292G, or 292I, (aa) 293S, (bb) 301 W, (cc) 304E, (dd) 311E, 311G, or 311S, (ee) 316F, (ff) 328V, (gg) 330R, (hh) 339E or 339L, (ii) 343I or 343V, (jj) 373A, 373G, or 373S, (kk) 376E, 376 W, or 376Y, (11) 380D, (mm) 382D or 382P, (nn) 385P, (oo) 424H, 424M, or 424V, (pp) 434I, (qq) 438G, (rr) 439E, 439H, or 439Q, (ss) 440A, 440D, 440E, 440F, 440M, 440T, or 440V, (tt) E233P, (uu) L235E, (vv) L234A and L235A, (ww) L234A, L235A, and G237A, (xx) L234A, L235A, and P329G, (yy) L234F, L235E, and P331 S, (zz) L234A, L235E, and G237A, (aaa), L234A, L235E, G237A, and P331 S (bbb) L234A, L235A, G237A, P238 S, H268A, A330 S, and P331 S (IgG16), (ccc) L234A, L235A, and P329A, (ddd) G236R and L328R, (eee) G237A, (fff) F241A, (ggg) V264A, (hhh) D265A, (iii) D265A and N297A, (jjj) D265A and N297G, (kkk) D270A, (111) A330L, (mmm) P331A or P331S, or (nnn) any combination of two or more selected from (a)-(uu), per Kabat numbering. In some embodiments, the antibody or antigen binding fragment comprises a human IgG4 Fc region. In some embodiments, the antibody or antigen binding fragment comprises a Fc region comprising a sequence at least about 90%, 91%, 92%, 93%, 94%, 95%, 96%, 97%, 98%, 99%, or 100% identical to any one of SEQ ID NOS: 320-362. In some embodiments, the antibody or antigen binding fragment comprises at least about 80% monomeric fraction as determined by size exclusion chromatography. In some embodiments, the antibody or antigen binding fragment expresses at least about 20 ug/ml total antibody, optionally about 20 ug/ml and 70 ug/mL total antibody.

[1070] In another aspect, provided herein is an antibody or antigen binding fragment thereof that binds to tumor necrosis factor-like protein 1A (TL1A), comprising a heavy chain variable domain comprising an amino acid sequence at least 96% identical to SEQ ID NO: 104, and a light chain variable domain comprising an amino acid sequence at least 97% identical to SEQ ID NO: 201. In some embodiments, the heavy chain variable domain comprises an amino acid sequence at least 97% identical to SEQ ID NO: 104. In some embodiments, the heavy chain variable domain comprises an amino acid sequence at least 98% identical to SEQ ID NO: 104. In some embodiments, the heavy chain variable domain comprises an amino acid sequence at least 99% identical to SEQ ID NO: 104. In some embodiments, the heavy chain variable domain comprises SEQ ID NO: 104. In some embodiments, the light chain variable domain comprises an amino acid sequence at least 98% identical to SEQ ID NO: 201. In some embodiments, the light chain variable domain comprises an amino acid sequence at least about 99% identical to SEQ ID NO: 201. In some embodiments, the light chain variable domain comprises SEQ ID NO: 201.

[1071] In another aspect, provided herein is an antibody or antigen binding fragment thereof that binds to tumor necrosis factor-like protein 1A (TL1A), comprising a heavy chain variable domain comprising an amino acid sequence at least about 99% identical to any one of SEQ ID NOS: 101-135, and a light chain variable domain comprising an amino acid sequence at least about 99% identical to any one of SEQ ID NOS: 201-206.

[1072] In some embodiments, antibodies or antigen binding fragments described herein comprise a human IgG1 Fc region comprising (a) 297A, 297Q, 297G, or 297D, (b) 279F, 279K, or 279L, (c) 228P, (d) 235A, 235E, 235G, 235Q, 235R, or 235S, (e) 237A, 237E, 237K, 237N, or 237R, (f) 234A, 234V, or 234F, (g) 233P, (h) 328A, (i) 327Q or 327T, (j) 329A, 329G, 329Y, or 329R (k) 331S, (1) 236F or 236R, (m) 238A, 238E, 238G, 238H, 238I, 238V, 238 W, or 238Y, (n) 248A, (o) 254D, 254E, 254G, 254H, 254I, 254N, 254P, 254Q, 254T, or 254V, (p) 255N, (q) 256H, 256K, 256R, or 256V, (r) 264S, (s) 265H, 265K, 265S, 265Y, or 265A, (t) 267G, 267H, 267I, or 267K, (u) 268K, (v) 269N or 269Q, (w) 270A, 270G, 270M, or 270N, (x) 271T, (y) 272N, (z) 292E, 292F, 292G, or 292I, (a a) 293S, (bb) 301 W, (cc) 304E, (dd) 311E, 311G, or 311S, (ee) 316F, (ff) 328V, (gg) 330R, (hh) 339E or 339L, (ii) 343I or 343V, (jj) 373A, 373G, or 373S, (kk) 376E, 376 W, or 376Y, (11) 380D, (mm) 382D or 382P, (nn) 385P, (oo) 424H, 424M, or 424V, (pp) 434I, (qq) 438G, (rr) 439E, 439H, or 439Q, (ss) 440A, 440D, 440E, 440F, 440M, 440T, or 440V, (tt) E233P, (uu) L235E, (vv) L234A and L235A, (ww) L234A, L235A, and G237A, (xx) L234A, L235A, and P329G, (yy) L234F, L235E, and P331 S, (zz) L234A, L235E, and G237A, (aaa), L234A, L235E, G237A, and P331S (bbb) L234A, L235A, G237A, P238S, H268A, A330S, and P331 S (IgG16), (ccc) L234A, L235A, and P329A, (ddd) G236R and L328R, (eee) G237A, (fff) F241A, (ggg) V264A, (hhh) D265A, (iii) D265A and N297A, (jjj) D265A and N297G, (kkk) D270A, (111) A330L, (mmm) P331A or P331S, or (nnn) any combination of two or more selected from (a)-(uu), per Kabat numbering. In some embodiments, antibodies or antigen binding fragments described herein comprise a human IgG4 Fc region. In some embodiments, antibodies or antigen binding fragments described herein comprise a Fc region comprising a sequence at least about 90%, 91%, 92%, 93%, 94%, 95%, 96%, 97%, 98%, 99%, or 100% identical to any one of SEQ ID NOS: 320-362. In some embodiments, antibodies or antigen binding fragments described herein comprise at least about 80% monomeric fraction as determined by size exclusion chromatography. In some embodiments, antibodies or antigen binding fragments described herein express at least about 20 ug/ml total antibody, optionally about 20 ug/ml and 70 ug/mL total antibody.

[1073] In another aspect, provided herein is an antibody or antigen binding fragment thereof that binds to TL1A, comprising a heavy chain variable region comprising: (a) an HCDR1 comprising an amino acid sequence set forth by SEQ ID NO: 1; (b) an HCDR2 comprising an amino acid sequence set forth by any one of SEQ ID NOS: 2-5; and (c) an HCDR3 comprising an amino acid sequence set forth by any one of SEQ ID NOS: 6-9; and the light chain variable region comprises: (d) an LCDR1 comprising an amino acid sequence set forth by SEQ ID NO: 10; (e) an LCDR2 comprising an amino acid sequence set forth by SEQ ID NO: 11; (f) an LCDR3 comprising an amino acid sequence set forth by any one of SEQ ID NOS: 12-15; and a fragment crystallizable (Fc) region comprising reduced antibody-dependent cell-mediated cytotoxicity (ADCC) function as compared to human IgG1 and/or reduced complement-dependent cytotoxicity (CDC) as compared to human IgG1. In some embodiments, the human IgG1 comprises SEQ ID NO: 320. In some embodiments, the ADCC function of the Fc region comprising reduced ADCC is at least about 50% reduced as compared to human IgG1. In some embodiments, the CDC function of the Fc region comprising reduced CDC is at least about 50% reduced as compared to human IgG1. In some embodiments, the Fc region comprises a human IgG1 comprising (a) 297A, 297Q, 297G, or 297D, (b) 279F, 279K, or 279L, (c) 228P, (d) 235A, 235E, 235G, 235Q, 235R, or 235S, (e) 237A, 237E, 237K, 237N, or 237R, (f) 234A, 234V, or 234F, (g) 233P, (h) 328A, (i) 327Q or 327T, (j) 329A, 329G, 329Y, or 329R (k) 331S, (1) 236F or 236R, (m) 238A, 238E, 238G, 238H, 238I, 238V, 238 W, or 238Y, (n) 248A, (o) 254D, 254E, 254G, 254H, 254I, 254N, 254P, 254Q, 254T, or 254V, (p) 255N, (q) 256H, 256K, 256R, or 256V, (r) 264S, (s) 265H, 265K, 265S, 265Y, or 265A, (t) 267G, 267H, 267I, or 267K, (u) 268K, (v) 269N or 269Q, (w) 270A, 270G, 270M, or 270N, (x) 271T, (y) 272N, (z) 292E, 292F, 292G, or 292I, (aa) 293S, (bb) 301 W, (cc) 304E, (dd) 311E, 311G, or 311S, (ee) 316F, (ff) 328V, (gg) 330R, (hh) 339E or 339L, (ii) 343I or 343V, (jj) 373A, 373G, or 373S, (kk) 376E, 376 W, or 376Y, (11) 380D, (mm) 382D or 382P, (nn) 385P, (oo) 424H, 424M, or 424V, (pp) 434I, (qq) 438G, (rr) 439E, 439H, or 439Q, (ss) 440A, 440D, 440E, 440F, 440M, 440T, or 440V, (tt) E233P, (uu) L235E, (vv) L234A and L235A, (ww) L234A, L235A, and G237A, (xx) L234A, L235A, and P329G, (yy) L234F, L235E, and P331S, (zz) L234A, L235E, and G237A, (aaa), L234A, L235E, G237A, and P331S (bbb) L234A, L235A, G237A, P238S, H268A, A330S, and P331S (IgG16), (ccc) L234A, L235A, and P329A, (ddd) G236R and L328R, (eee) G237A, (fff) F241A, (ggg) V264A, (hhh) D265A, (iii) D265A and N297A, (jjj) D265A and N297G, (kkk) D270A, (111) A330L, (mmm) P331A or P331S, or (nnn) any combination of (a)-(uu), per Kabat numbering. In some embodiments, the antibody or antigen binding fragment comprises a (i) human IgG4 Fc region or (ii) a human IgG4 Fc region comprising (a) S228P, (b) S228P and L235E, or (c) S228P, F234A, and L235A, per Kabat numbering. In some embodiments, the antibody or antigen binding fragment comprises a human IgG2 Fc region; IgG2-IgG4 cross-subclass Fc region; IgG2-IgG3 cross-subclass Fc region; IgG2 comprising H268Q, V309L, A330S, P331S (IgG2m4); or IgG2 comprising V234A, G237A, P238S, H268A, V309L, A330S, P331S (IgG26). In some embodiments, the Fc region comprises a human IgG1 with a substitution selected from 329A, 329G, 329Y, 331S, 236F, 236R, 238A, 238E, 238G, 238H, 238I, 238V, 238 W, 238Y, 248A, 254D, 254E, 254G, 254H, 254I, 254N, 254P, 254Q, 254T, 254V, 264S, 265H, 265K, 265S, 265Y, 265A, 267G, 267H, 267I, 267K, 434I, 438G, 439E, 439H, 439Q, 440A, 440D, 440E, 440F, 440M, 440T, and 440V, per Kabat numbering. In some embodiments, the antibody or antigen binding fragment comprises a sequence at least about 90%, 91%, 92%, 93%, 94%, 95%, 96%, 97%, 98%, 99%, or 100% identical to any one of SEQ ID NOS: 320-362. In some embodiments, the HCDR1 comprises SEQ ID NO: 1, HCDR2 comprises any one of SEQ ID NOS: 2-5, HCDR3 comprises any one of SEQ ID NOS: 6-9, LCDR1 comprises SEQ ID NO: 10, LCDR2 comprises SEQ ID NO: 11, and LCDR3 comprises any one of SEQ ID NOS: 12-15. In some embodiments, the Fc region comprises any one of SEQ ID NOs: 401-413 or a sequence at least about 90%, 91%, 92%, 93%, 94%, 95%, 96%, 97%, 98%, or 99% identical to any one of SEQ ID NOs: 401-413. In some embodiments, the heavy chain comprises any one of SEQ ID NOs: 501-513 or a sequence at least about 90%, 91%, 92%, 93%, 94%, 95%, 96%, 97%, 98%, or 99% identical to any one of SEQ ID NOs: 501-513. In some embodiments, the light chain comprises any one of SEQ ID NO: 514 or a sequence at least about 90%, 91%, 92%, 93%, 94%, 95%, 96%, 97%, 98%, or 99% identical to any one of SEQ ID NO: 514. In some embodiments, the HCDR2 comprises SEQ ID NO: 2, the HCDR3 comprises SEQ ID NO: 6, and the LCDR3 comprises SEQ ID NO: 12, and wherein the Fc region comprises any one of SEQ ID NOs: 401-413 or a sequence at least about 90%, 91%, 92%, 93%, 94%, 95%, 96%, 97%, 98%, or 99% identical to any one of SEQ ID NOs: 401-413. In some embodiments, the antibody or antigen binding fragment comprises at least about 80% monomeric fraction as determined by size exclusion chromatography. In some embodiments, the antibody or antigen binding fragment expresses at least about 20 ug/ml total antibody, optionally about 20 ug/ml and 70 ug/mL total antibody.

[1074] Further provided are methods of treating fibrosis or an intestinal inflammatory condition, disease, or disorder in a subject in need thereof, the method comprising administering to the subject an antibody or antigen binding fragment of any antibody or antigen binding fragment disclosed herein. In some embodiments, the subject has fibrosis. In some embodiments, the subject has an intestinal inflammatory condition, disease, or disorder. In some embodiments, the intestinal inflammatory condition, disease, or disorder comprises inflammatory bowel disease (IBD). In some embodiments, the IBD comprises Crohn's Disease. In some embodiments, the IBD comprises ulcerative colitis.

[1075] In some embodiments, antibodies or antigen binding fragments described herein comprise are present in a liquid composition a concentration of the antibody or antigen binding fragment of 10 mg/ml to 170 mg/ml. In some embodiments, the antibody or antigen binding fragment thereof is at a concentration of 10 mg/ml to 170 mg/ml. In some embodiments, the viscosity is from about 4 to about 30 mPa-s (millipascal-second (mPa·s)). In some embodiments, the viscosity is from about 4 to about 10 mPa-s (millipascal-second (mPa·s)).

[1076] In another aspect, provided herein, is an antibody or antigen binding fragment thereof that binds to TL1A, comprising a heavy chain variable framework region comprising a human IGHV1-46*02 framework or a modified human IGHV1-46*02 framework, and a light chain variable framework region comprising a human IGKV3-20 framework or a modified human IGKV3-20 framework; wherein the heavy chain variable framework region and the light chain variable framework region collectively comprise less than about 14 amino acid modifications from the human IGHV1-46*02 framework and the human IGKV3-20 framework. In some embodiments, the heavy chain variable framework region and the light chain variable framework region collectively comprise 13, 12, 11, 10, 9, 8, 7, 6, 5, 4, 3, 2, 1, or no amino acid modifications from the human IGHV1-46*02 framework and the human IGKV3-20 framework. In some embodiments, the amino acid modification comprises a modification at amino acid position 1 in the heavy chain variable region, per Aho or Kabat numbering. In some embodiments, the amino acid at position 1 comprises A, R, N, D, C, E, G, H, I, L, K, M, F, P, S, T, W, Y, or V. In some embodiments, the amino acid at position 1 comprises a hydrophobic amino acid, a hydrophilic amino acid, or an amphipathic amino acid. In some embodiments, the amino acid at position 1 comprises an aliphatic amino acid, an aromatic amino acid, an acidic amino acid, a basic amino acid, a hydroxylic amino acid, a sulfur-containing amino acid, or an amidic amino acid. In some embodiments, the amino acid at position 1 comprises E. In some embodiments, the amino acid modification comprises a modification at amino acid position 45 in the heavy chain variable region, per Aho or Kabat numbering. In some embodiments, the amino acid at position 45 comprises A, N, D, C, Q, E, G, H, I, L, K, M, F, P, S, T, W, Y, or V. In some embodiments, the amino acid at position 45 comprises a hydrophobic amino acid, a hydrophilic amino acid, or an amphipathic amino acid. In some embodiments, the amino acid at position 45 comprises an aliphatic amino acid, an aromatic amino acid, an acidic amino acid, a basic amino acid, a hydroxylic amino acid, a sulfur-containing amino acid, or an amidic amino acid. In some embodiments, the amino acid at position 45 comprises K. In some embodiments, the amino acid modification comprises a modification at amino acid position 47 in the heavy chain variable region, per Aho or Kabat numbering. In some embodiments, the amino acid at position 47 comprises R, N, D, C, Q, E, G, H, I, L, K, M, F, P, S, T, W, Y, or V. In some embodiments, the amino acid at position 47 comprises a hydrophobic amino acid, a hydrophilic amino acid, or an amphipathic amino acid. In some embodiments, the amino acid at position 47 comprises an aliphatic amino acid, an aromatic amino acid, an acidic amino acid, a basic amino acid, a hydroxylic amino acid, a sulfur-containing amino acid, or an amidic amino acid. In some embodiments, the amino acid at position 47 comprises R. In some embodiments, the amino acid modification comprises a modification at amino acid position 55 in the heavy chain variable region, per Aho or Kabat numbering. In some embodiments, the amino acid at position 55 comprises A, R, N, D, C, Q, E, G, H, I, L, K, F, P, S, T, W, Y, or V. In some embodiments, the amino acid at position 55 comprises a hydrophobic amino acid, a hydrophilic amino acid, or an amphipathic amino acid. In some embodiments, the amino acid at position 55 comprises an aliphatic amino acid, an aromatic amino acid, an acidic amino acid, a basic amino acid, a hydroxylic amino acid, a sulfur-containing amino acid, or an amidic amino acid. In some embodiments, the amino acid at position 55 comprises I. In some embodiments, the amino acid modification comprises a modification at amino acid position 78 in the heavy chain variable region, per Aho or Kabat numbering. In some embodiments, the amino acid at position 78 comprises A, R, N, D, C, Q, E, G, H, I, L, K, M, F, P, S, T, W, or Y. In some embodiments, the amino acid at position 78 comprises a hydrophobic amino acid, a hydrophilic amino acid, or an amphipathic amino acid. In some embodiments, the amino acid at position 78 comprises an aliphatic amino acid, an aromatic amino acid, an acidic amino acid, a basic amino acid, a hydroxylic amino acid, a sulfur-containing amino acid, or an amidic amino acid. In some embodiments, the amino acid at position 78 comprises A. In some embodiments, the amino acid modification comprises a modification at amino acid position 80 in the heavy chain variable region, per Aho or Kabat numbering. In some embodiments, the amino acid at position 80 comprises A, R, N, D, C, Q, E, G, H, I, L, K, F, P, S, T, W, Y, or V. In some embodiments, the amino acid at position 80 comprises a hydrophobic amino acid, a hydrophilic amino acid, or an amphipathic amino acid. In some embodiments, the amino acid at position 80 comprises an aliphatic amino acid, an aromatic amino acid, an acidic amino acid, a basic amino acid, a hydroxylic amino acid, a sulfur-containing amino acid, or an amidic amino acid. In some embodiments, the amino acid at position 80 comprises I. In some embodiments, the amino acid modification comprises a modification at amino acid position 82 in the heavy chain variable region, per Aho or Kabat numbering. In some embodiments, the amino acid at position 82 comprises A, N, D, C, Q, E, G, H, I, L, K, M, F, P, S, T, W, Y, or V. In some embodiments, the amino acid at position 82 comprises a hydrophobic amino acid, a hydrophilic amino acid, or an amphipathic amino acid. In some embodiments, the amino acid at position 82 comprises an aliphatic amino acid, an aromatic amino acid, an acidic amino acid, a basic amino acid, a hydroxylic amino acid, a sulfur-containing amino acid, or an amidic amino acid. In some embodiments, the amino acid at position 82 comprises T. In some embodiments, the amino acid modification comprises a modification at amino acid position 89 in the heavy chain variable region, per Aho or Kabat numbering. In some embodiments, the amino acid at position 89 comprises A, R, N, D, C, Q, E, G, H, I, L, K, M, F, P, S, T, W, or Y. In some embodiments, the amino acid at position 89 comprises a hydrophobic amino acid, a hydrophilic amino acid, or an amphipathic amino acid. In some embodiments, the amino acid at position 89 comprises an aliphatic amino acid, an aromatic amino acid, an acidic amino acid, a basic amino acid, a hydroxylic amino acid, a sulfur-containing amino acid, or an amidic amino acid. In some embodiments, the amino acid at position 89 comprises A. In some embodiments, the amino acid modification comprises a modification at amino acid position 91 in the heavy chain variable region, per Aho or Kabat numbering. In some embodiments, the amino acid at position 91 comprises A, R, N, D, C, Q, E, G, H, I, L, K, F, P, S, T, W, Y, or V. In some embodiments, the amino acid at position 91 comprises a hydrophobic amino acid, a hydrophilic amino acid, or an amphipathic amino acid. In some embodiments, the amino acid at position 91 comprises an aliphatic amino acid, an aromatic amino acid, an acidic amino acid, a basic amino acid, a hydroxylic amino acid, a sulfur-containing amino acid, or an amidic amino acid. In some embodiments, the amino acid at position 91 comprises L.

[1077] In some embodiments, the amino acid modifications comprise one or more of: Q1E, R45K, A47R, M55I, V78A, M80I, R82T, V89A, M91L in the heavy chain variable region, per Aho or Kabat numbering. In some embodiments, the amino acid modifications comprise Q1E. In some embodiments, the amino acid modifications comprise R45K. In some embodiments, the amino acid modifications comprise A47R. In some embodiments, the amino acid modifications comprise M55I. In some embodiments, the amino acid modifications comprise V78A. In some embodiments, the amino acid modifications comprise M80I. In some embodiments, the amino acid modifications comprise R82T. In some embodiments, the amino acid modifications comprise V89A. In some embodiments, the amino acid modifications comprise M91L.

[1078] In some embodiments, the amino acid modification comprises a modification at amino acid position 54 in the light chain variable region, per Aho or Kabat numbering. In some embodiments, the amino acid at position 54 comprises A, R, N, D, C, Q, E, G, H, I, K, M, F, P, S, T, W, Y, or V. In some embodiments, the amino acid at position 54 comprises a hydrophobic amino acid, a hydrophilic amino acid, or an amphipathic amino acid. In some embodiments, the amino acid at position 54 comprises an aliphatic amino acid, an aromatic amino acid, an acidic amino acid, a basic amino acid, a hydroxylic amino acid, a sulfur-containing amino acid, or an amidic amino acid. In some embodiments, the amino acid at position 54 comprises P. In some embodiments, the amino acid modification comprises a modification at amino acid position 55 in the light chain variable region, per Aho or Kabat numbering. In some embodiments, the amino acid at position 55 comprises A, R, N, D, C, Q, E, G, H, I, K, M, F, P, S, T, W, Y, or V. In some embodiments, the amino acid at position 55 comprises a hydrophobic amino acid, a hydrophilic amino acid, or an amphipathic amino acid. In some embodiments, the amino acid at position 55 comprises an aliphatic amino acid, an aromatic amino acid, an acidic amino acid, a basic amino acid, a hydroxylic amino acid, a sulfur-containing amino acid, or an amidic amino acid. In some embodiments, the amino acid at position 55 comprises W.

[1079] In some embodiments, the amino acid modifications comprise L54P and/or L55 W in the light chain variable region, per Aho or Kabat numbering. In some embodiments, the amino acid modifications comprise L54P. In some embodiments, the amino acid modifications comprise L55W.

[1080] In some embodiments, the antibody or antigen binding fragment comprises a heavy chain CDR1 as set forth by SEQ ID NO: 1. In some embodiments, the antibody or antigen binding fragment comprises a heavy chain CDR2 as set forth by SEQ ID NO: 2. In some embodiments, the antibody or antigen binding fragment comprises a heavy chain CDR2 as set forth by SEQ ID NO: 3. In some embodiments, the antibody or antigen binding fragment comprises a heavy chain CDR2 as set forth by SEQ ID NO: 4. In some embodiments, the antibody or antigen binding fragment comprises a heavy chain CDR2 as set forth by SEQ ID NO: 5. In some embodiments, the antibody or antigen binding fragment comprises a heavy chain CDR3 as set forth by SEQ ID NO: 6. In some embodiments, the antibody or antigen binding fragment comprises a heavy chain CDR3 as set forth by SEQ ID NO: 7. In some embodiments, the antibody or antigen binding fragment comprises a heavy chain CDR3 as set forth by SEQ ID NO: 8. In some embodiments, the antibody or antigen binding fragment comprises a heavy chain CDR3 as set forth by SEQ ID NO: 9. In some embodiments, the antibody or antigen binding fragment comprises a light chain CDR1 as set forth by SEQ ID NO: 10. In some embodiments, the antibody or antigen binding fragment comprises a light chain CDR2 as set forth by SEQ ID NO: 11. In some embodiments, the antibody or antigen binding fragment comprises a light chain CDR3 as set forth by SEQ ID NO: 12. In some embodiments, the antibody or antigen binding fragment comprises a light chain CDR3 as set forth by SEQ ID NO: 13. In some embodiments, the antibody or antigen binding fragment comprises a light chain CDR3 as set forth by SEQ ID NO: 14. In some embodiments, the antibody or antigen binding fragment comprises a light chain CDR3 as set forth by SEQ ID NO: 15.

[1081] In some embodiments, the antibody or antigen binding fragment comprises a heavy chain FR1 as set forth by SEQ ID NO: 304. In some embodiments, the antibody or antigen binding fragment comprises a heavy chain FR2 as set forth by SEQ ID NO: 305. In some embodiments, the antibody or antigen binding fragment comprises a heavy chain FR2 as set forth by SEQ ID NO: 313. In some embodiments, the antibody or antigen binding fragment comprises a heavy chain FR3 as set forth by SEQ ID NO: 306. In some embodiments, the antibody or antigen binding fragment comprises a heavy chain FR3 as set forth by SEQ ID NO: 307. In some embodiments, the antibody or antigen binding fragment comprises a heavy chain FR3 as set forth by SEQ ID NO: 314. In some embodiments, the antibody or antigen binding fragment comprises a heavy chain FR3 as set forth by SEQ ID NO: 315. In some embodiments, the antibody or antigen binding fragment comprises a heavy chain FR4 as set forth by SEQ ID NO: 308. In some embodiments, the antibody or antigen binding fragment comprises a light chain FR1 as set forth by SEQ ID NO: 309. In some embodiments, the antibody or antigen binding fragment comprises a light chain FR2 as set forth by SEQ ID NO: 310. In some embodiments, the antibody or antigen binding fragment comprises a light chain FR3 as set forth by SEQ ID NO: 311. In some embodiments, the antibody or antigen binding fragment comprises a light chain FR4 as set forth by SEQ ID NO: 312.

[1082] In another aspect, provided herein is an antibody or antigen binding fragment thereof that binds to TL1A, comprising: (a) a heavy chain variable region comprising SEQ ID NO: 301 (X1VQLVQSGAEVKKPGASVKVSCKAS[HCDR1]WVX2QX3PGQGLEWX4G[HCDR2]RX5TX6TX7DTSTSTX8YX9ELSSLRSEDTAVYYCAR[HCDR3]WGQGTTVTVSS), and (b) a light chain variable region comprising SEQ ID NO: 303 (EIVLTQSPGTLSLSPGERATLSC[LCDR 1]WYQQKPGQAPRX10X11IY[LCDR2]GIPDR FSGSGSGTDFTLTISRLEPEDFAVYYC[LCDR3]FGGGTKLEIK), wherein each of X1-X11 is independently selected from A, R, N, D, C, Q, E, G, H, I, L, K, M, F, P, S, T, W, Y, or V.

[1083] In some embodiments, X1 comprises a hydrophobic amino acid, a hydrophilic amino acid, or an amphipathic amino acid. In some embodiments, X1 comprises an aliphatic amino acid, an aromatic amino acid, an acidic amino acid, a basic amino acid, a hydroxylic amino acid, a sulfur-containing amino acid, or an amidic amino acid. In some embodiments, X2 comprises a hydrophobic amino acid, a hydrophilic amino acid, or an amphipathic amino acid. In some embodiments, X2 comprises an aliphatic amino acid, an aromatic amino acid, an acidic amino acid, a basic amino acid, a hydroxylic amino acid, a sulfur-containing amino acid, or an amidic amino acid. In some embodiments, X3 comprises a hydrophobic amino acid, a hydrophilic amino acid, or an amphipathic amino acid. In some embodiments, X3 comprises an aliphatic amino acid, an aromatic amino acid, an acidic amino acid, a basic amino acid, a hydroxylic amino acid, a sulfur-containing amino acid, or an amidic amino acid. In some embodiments, X4 comprises a hydrophobic amino acid, a hydrophilic amino acid, or an amphipathic amino acid. In some embodiments, X4 comprises an aliphatic amino acid, an aromatic amino acid, an acidic amino acid, a basic amino acid, a hydroxylic amino acid, a sulfur-containing amino acid, or an amidic amino acid. In some embodiments, X5 comprises a hydrophobic amino acid, a hydrophilic amino acid, or an amphipathic amino acid. In some embodiments, X5 comprises an aliphatic amino acid, an aromatic amino acid, an acidic amino acid, a basic amino acid, a hydroxylic amino acid, a sulfur-containing amino acid, or an amidic amino acid. In some embodiments, X6 comprises a hydrophobic amino acid, a hydrophilic amino acid, or an amphipathic amino acid. In some embodiments, X6 comprises an aliphatic amino acid, an aromatic amino acid, an acidic amino acid, a basic amino acid, a hydroxylic amino acid, a sulfur-containing amino acid, or an amidic amino acid. In some embodiments, X7 comprises a hydrophobic amino acid, a hydrophilic amino acid, or an amphipathic amino acid. In some embodiments, X7 comprises an aliphatic amino acid, an aromatic amino acid, an acidic amino acid, a basic amino acid, a hydroxylic amino acid, a sulfur-containing amino acid, or an amidic amino acid. In some embodiments, X8 comprises a hydrophobic amino acid, a hydrophilic amino acid, or an amphipathic amino acid. In some embodiments, X8 comprises an aliphatic amino acid, an aromatic amino acid, an acidic amino acid, a basic amino acid, a hydroxylic amino acid, a sulfur-containing amino acid, or an amidic amino acid. In some embodiments, X9 comprises a hydrophobic amino acid, a hydrophilic amino acid, or an amphipathic amino acid. In some embodiments, X9 comprises an aliphatic amino acid, an aromatic amino acid, an acidic amino acid, a basic amino acid, a hydroxylic amino acid, a sulfur-containing amino acid, or an amidic amino acid. In some embodiments, X10 comprises a hydrophobic amino acid, a hydrophilic amino acid, or an amphipathic amino acid. In some embodiments, X10 comprises an aliphatic amino acid, an aromatic amino acid, an acidic amino acid, a basic amino acid, a hydroxylic amino acid, a sulfur-containing amino acid, or an amidic amino acid. In some embodiments, X11 comprises a hydrophobic amino acid, a hydrophilic amino acid, or an amphipathic amino acid. In some embodiments, X11 comprises an aliphatic amino acid, an aromatic amino acid, an acidic amino acid, a basic amino acid, a hydroxylic amino acid, a sulfur-containing amino acid, or an amidic amino acid.

[1084] In some embodiments, X1=Q or E, X2=R or K, X3=A or R, X4=M or I, X5=V or A, X6=M or I, X7=R or T, X8=V or A, X9=M or L, X10=L or P, and X11=L or W. In some embodiments, X1=Q. In some embodiments, X1=E. In some embodiments, X2=R. In some embodiments, X2=K. In some embodiments, X3=A. In some embodiments, X3=R. In some embodiments, X4=M. In some embodiments, X4=I. In some embodiments, X5=V. In some embodiments, X5=A. In some embodiments, X6=M. In some embodiments, X6=I. In some embodiments, X7=R. In some embodiments, X7=T. In some embodiments, X8=V. In some embodiments, X8=A. In some embodiments, X9=M. In some embodiments, X9=L. In some embodiments, X10=L. In some embodiments, X10=P. In some embodiments, X11=L. In some embodiments, X11=W.

[1085] In some embodiments, HCDR1 comprises SEQ ID NO: 1. In some embodiments, HCDR2 comprises SEQ ID NO: 2. In some embodiments, HCDR2 comprises SEQ ID NO: 3. In some embodiments, HCDR2 comprises SEQ ID NO: 4. In some embodiments, HCDR2 comprises SEQ ID NO: 5. In some embodiments, HCDR3 comprises SEQ ID NO: 6. In some embodiments, HCDR3 comprises SEQ ID NO: 7. In some embodiments, HCDR3 comprises SEQ ID NO: 8. In some embodiments, HCDR3 comprises SEQ ID NO: 9. In some embodiments, LCDR1 comprises SEQ ID NO: 10. In some embodiments, LCDR2 comprises SEQ ID NO: 11. In some embodiments, LCDR3 comprises SEQ ID NO: 12. In some embodiments, LCDR3 comprises SEQ ID NO: 13. In some embodiments, LCDR3 comprises SEQ ID NO: 14. In some embodiments, the antibody or antigen binding fragment comprises a light chain CDR3 as set forth by SEQ ID NO: 15.

[1086] In another aspect, provided herein is an antibody or antigen binding fragment thereof that binds to TL1A, comprising: (a) a heavy chain variable region comprising SEQ ID NO: 302 (X1VQLVQSGAEVKKPGASVKVSCKAS[HCDR1]WVX2QX3PGQGLEWX4G[HCDR2]RX5TX6TX7DTSTSTX8YX9ELSSLRSEDTAVYYC [HCDR3]WGQGTTVTVSS), and (b) a light chain variable region comprising SEQ ID NO: 303 (EIVLTQSPGTLSLSPGERATLSC[LCDR1]WYQQKPGQAPRX10X11IY[LCDR2]GIPDR FSGSGSGTDFTLTISRLEPEDFAVYYC[LCDR3]FGGGTKLEIK), wherein each of X1-X11 is independently selected from A, R, N, D, C, Q, E, G, H, I, L, K, M, F, P, S, T, W, Y, or V.

[1087] In some embodiments, X1 comprises a hydrophobic amino acid, a hydrophilic amino acid, or an amphipathic amino acid. In some embodiments, X1 comprises an aliphatic amino acid, an aromatic amino acid, an acidic amino acid, a basic amino acid, a hydroxylic amino acid, a sulfur-containing amino acid, or an amidic amino acid. In some embodiments, X2 comprises a hydrophobic amino acid, a hydrophilic amino acid, or an amphipathic amino acid. In some embodiments, X2 comprises an aliphatic amino acid, an aromatic amino acid, an acidic amino acid, a basic amino acid, a hydroxylic amino acid, a sulfur-containing amino acid, or an amidic amino acid. In some embodiments, X3 comprises a hydrophobic amino acid, a hydrophilic amino acid, or an amphipathic amino acid. In some embodiments, X3 comprises an aliphatic amino acid, an aromatic amino acid, an acidic amino acid, a basic amino acid, a hydroxylic amino acid, a sulfur-containing amino acid, or an amidic amino acid. In some embodiments, X4 comprises a hydrophobic amino acid, a hydrophilic amino acid, or an amphipathic amino acid. In some embodiments, X4 comprises an aliphatic amino acid, an aromatic amino acid, an acidic amino acid, a basic amino acid, a hydroxylic amino acid, a sulfur-containing amino acid, or an amidic amino acid. In some embodiments, X5 comprises a hydrophobic amino acid, a hydrophilic amino acid, or an amphipathic amino acid. In some embodiments, X5 comprises an aliphatic amino acid, an aromatic amino acid, an acidic amino acid, a basic amino acid, a hydroxylic amino acid, a sulfur-containing amino acid, or an amidic amino acid. In some embodiments, X6 comprises a hydrophobic amino acid, a hydrophilic amino acid, or an amphipathic amino acid. In some embodiments, X6 comprises an aliphatic amino acid, an aromatic amino acid, an acidic amino acid, a basic amino acid, a hydroxylic amino acid, a sulfur-containing amino acid, or an amidic amino acid. In some embodiments, X7 comprises a hydrophobic amino acid, a hydrophilic amino acid, or an amphipathic amino acid. In some embodiments, X7 comprises an aliphatic amino acid, an aromatic amino acid, an acidic amino acid, a basic amino acid, a hydroxylic amino acid, a sulfur-containing amino acid, or an amidic amino acid. In some embodiments, X8 comprises a hydrophobic amino acid, a hydrophilic amino acid, or an amphipathic amino acid. In some embodiments, X8 comprises an aliphatic amino acid, an aromatic amino acid, an acidic amino acid, a basic amino acid, a hydroxylic amino acid, a sulfur-containing amino acid, or an amidic amino acid. In some embodiments, X9 comprises a hydrophobic amino acid, a hydrophilic amino acid, or an amphipathic amino acid. In some embodiments, X9 comprises an aliphatic amino acid, an aromatic amino acid, an acidic amino acid, a basic amino acid, a hydroxylic amino acid, a sulfur-containing amino acid, or an amidic amino acid. In some embodiments, X10 comprises a hydrophobic amino acid, a hydrophilic amino acid, or an amphipathic amino acid. In some embodiments, X10 comprises an aliphatic amino acid, an aromatic amino acid, an acidic amino acid, a basic amino acid, a hydroxylic amino acid, a sulfur-containing amino acid, or an amidic amino acid. In some embodiments, X11 comprises a hydrophobic amino acid, a hydrophilic amino acid, or an amphipathic amino acid. In some embodiments, X11 comprises an aliphatic amino acid, an aromatic amino acid, an acidic amino acid, a basic amino acid, a hydroxylic amino acid, a sulfur-containing amino acid, or an amidic amino acid.

[1088] In some embodiments, X1=Q or E, X2=R or K, X3=A or R, X4=M or I, X5=V or A, X6=M or I, X7=R or T, X8=V or A, X9=M or L, X10=L or P, and X11=L or W. In some embodiments, X1=Q. In some embodiments, X1=E. In some embodiments, X2=R. In some embodiments, X2=K. In some embodiments, X3=A. In some embodiments, X3=R. In some embodiments, X4=M. In some embodiments, X4=I. In some embodiments, X5=V. In some embodiments, X5=A. In some embodiments, X6=M. In some embodiments, X6=I. In some embodiments, X7=R. In some embodiments, X7=T. In some embodiments, X8=V. In some embodiments, X8=A. In some embodiments, X9=M. In some embodiments, X9=L. In some embodiments, X10=L. In some embodiments, X10=P. In some embodiments, X11=L. In some embodiments, X11=W.

[1089] In some embodiments, HCDR1 comprises SEQ ID NO: 1. In some embodiments, HCDR2 comprises SEQ ID NO: 2. In some embodiments, HCDR2 comprises SEQ ID NO: 3. In some embodiments, HCDR2 comprises SEQ ID NO: 4. In some embodiments, HCDR2 comprises SEQ ID NO: 5. In some embodiments, HCDR3 comprises SEQ ID NO: 6. In some embodiments, HCDR3 comprises SEQ ID NO: 7. In some embodiments, HCDR3 comprises SEQ ID NO: 8. In some embodiments, HCDR3 comprises SEQ ID NO: 9. In some embodiments, LCDR1 comprises SEQ ID NO: 10. In some embodiments, LCDR2 comprises SEQ ID NO: 11. In some embodiments, LCDR3 comprises SEQ ID NO: 12. In some embodiments, LCDR3 comprises SEQ ID NO: 13. In some embodiments, LCDR3 comprises SEQ ID NO: 14. In some embodiments, LCDR3 comprises SEQ ID NO: 15.

[1090] Further provided herein is an antibody or antigen binding fragment thereof that binds to tumor necrosis factor-like protein 1A (TL1A), comprising a heavy chain variable domain comprising an amino acid sequence at least about 96% identical to SEQ ID NO: 104, and a light chain variable domain comprising an amino acid sequence at least about 97% identical to SEQ ID NO: 201. In some embodiments, the heavy chain variable domain comprises an amino acid sequence at least about 97% identical to SEQ ID NO: 104. In some embodiments, the heavy chain variable domain comprises an amino acid sequence at least about 98% identical to SEQ ID NO: 104. In some embodiments, the heavy chain variable domain comprises an amino acid sequence at least about 99% identical to SEQ ID NO: 104. In some embodiments, the heavy chain variable domain comprises SEQ ID NO: 104. In some embodiments, the light chain variable domain comprises an amino acid sequence at least about 98% identical to SEQ ID NO: 201. In some embodiments, the light chain variable domain comprises an amino acid sequence at least about 99% identical to SEQ ID NO: 201. In some embodiments, the light chain variable domain comprises SEQ ID NO: 201.

[1091] Further provided herein is an antibody or antigen binding fragment thereof that binds to tumor necrosis factor-like protein 1A (TL1A), comprising a heavy chain variable domain comprising an amino acid sequence at least about 99% identical to SEQ ID NO: 107, and a light chain variable domain comprising an amino acid sequence at least about 97% identical to SEQ ID NO: 201. In some embodiments, the heavy chain variable domain comprises SEQ ID NO: 107. In some embodiments, the light chain variable domain comprises an amino acid sequence at least about 98% identical to SEQ ID NO: 201. In some embodiments, the light chain variable domain comprises an amino acid sequence at least about 99% identical to SEQ ID NO: 201. In some embodiments, the light chain variable domain comprises SEQ ID NO: 201.

[1092] Further provided herein is an antibody or antigen binding fragment thereof that binds to tumor necrosis factor-like protein 1A (TL1A), comprising a heavy chain variable domain comprising SEQ ID NO: 101, and a light chain variable domain comprising SEQ ID NOS: 201. Further provided herein is an antibody or antigen binding fragment thereof that binds to tumor necrosis factor-like protein 1A (TL1A), comprising a heavy chain variable domain comprising SEQ ID NO: 102, and a light chain variable domain comprising SEQ ID NOS: 201. Further provided herein is an antibody or antigen binding fragment thereof that binds to tumor necrosis factor-like protein 1A (TL1A), comprising a heavy chain variable domain comprising SEQ ID NO: 103, and a light chain variable domain comprising SEQ ID NOS: 202. Further provided herein is an antibody or antigen binding fragment thereof that binds to tumor necrosis factor-like protein 1A (TL1A), comprising a heavy chain variable domain comprising SEQ ID NO: 104, and a light chain variable domain comprising SEQ ID NOS: 201. Further provided herein is an antibody or antigen binding fragment thereof that binds to tumor necrosis factor-like protein 1A (TL1A), comprising a heavy chain variable domain comprising SEQ ID NO: 105, and a light chain variable domain comprising SEQ ID NOS: 201. Further provided herein is an antibody or antigen binding fragment thereof that binds to tumor necrosis factor-like protein 1A (TL1A), comprising a heavy chain variable domain comprising SEQ ID NO: 103, and a light chain variable domain comprising SEQ ID NOS: 201. Further provided herein is an antibody or antigen binding fragment thereof that binds to tumor necrosis factor-like protein 1A (TL1A), comprising a heavy chain variable domain comprising SEQ ID NO: 106, and a light chain variable domain comprising SEQ ID NOS: 201. Further provided herein is an antibody or antigen binding fragment thereof that binds to tumor necrosis factor-like protein 1A (TL1A), comprising a heavy chain variable domain comprising SEQ ID NO: 107, and a light chain variable domain comprising SEQ ID NOS: 201. Further provided herein is an antibody or antigen binding fragment thereof that binds to tumor necrosis factor-like protein 1A (TL1A), comprising a heavy chain variable domain comprising SEQ ID NO: 108, and a light chain variable domain comprising SEQ ID NOS: 202. Further provided herein is an antibody or antigen binding fragment thereof that binds to tumor necrosis factor-like protein 1A (TL1A), comprising a heavy chain variable domain comprising SEQ ID NO: 109, and a light chain variable domain comprising SEQ ID NOS: 202. Further provided herein is an antibody or antigen binding fragment thereof that binds to tumor necrosis factor-like protein 1A (TL1A), comprising a heavy chain variable domain comprising SEQ ID NO: 108, and a light chain variable domain comprising SEQ ID NOS: 201. Further provided herein is an antibody or antigen binding fragment thereof that binds to tumor necrosis factor-like protein 1A (TL1A), comprising a heavy chain variable domain comprising SEQ ID NO: 109, and a light chain variable domain comprising SEQ ID NOS: 201. Further provided herein is an antibody or antigen binding fragment thereof that binds to tumor necrosis factor-like protein 1A (TL1A), comprising a heavy chain variable domain comprising SEQ ID NO: 108, and a light chain variable domain comprising SEQ ID NOS: 203. Further provided herein is an antibody or antigen binding fragment thereof that binds to tumor necrosis factor-like protein 1A (TL1A), comprising a heavy chain variable domain comprising SEQ ID NO: 108, and a light chain variable domain comprising SEQ ID NOS: 204. Further provided herein is an antibody or antigen binding fragment thereof that binds to tumor necrosis factor-like protein 1A (TL1A), comprising a heavy chain variable domain comprising SEQ ID NO: 107, and a light chain variable domain comprising SEQ ID NOS: 204. Further provided herein is an antibody or antigen binding fragment thereof that binds to tumor necrosis factor-like protein 1A (TL1A), comprising a heavy chain variable domain comprising SEQ ID NO: 107, and a light chain variable domain comprising SEQ ID NOS: 202. Further provided herein is an antibody or antigen binding fragment thereof that binds to tumor necrosis factor-like protein 1A (TL1A), comprising a heavy chain variable domain comprising SEQ ID NO: 110, and a light chain variable domain comprising SEQ ID NOS: 204. Further provided herein is an antibody or antigen binding fragment thereof that binds to tumor necrosis factor-like protein 1A (TL1A), comprising a heavy chain variable domain comprising SEQ ID NO: 111, and a light chain variable domain comprising SEQ ID NOS: 201. Further provided herein is an antibody or antigen binding fragment thereof that binds to tumor necrosis factor-like protein 1A (TL1A), comprising a heavy chain variable domain comprising SEQ ID NO: 112, and a light chain variable domain comprising SEQ ID NOS: 201. Further provided herein is an antibody or antigen binding fragment thereof that binds to tumor necrosis factor-like protein 1A (TL1A), comprising a heavy chain variable domain comprising SEQ ID NO: 113, and a light chain variable domain comprising SEQ ID NOS: 204. Further provided herein is an antibody or antigen binding fragment thereof that binds to tumor necrosis factor-like protein 1A (TL1A), comprising a heavy chain variable domain comprising SEQ ID NO: 114, and a light chain variable domain comprising SEQ ID NOS: 201. Further provided herein is an antibody or antigen binding fragment thereof that binds to tumor necrosis factor-like protein 1A (TL1A), comprising a heavy chain variable domain comprising SEQ ID NO: 115, and a light chain variable domain comprising SEQ ID NOS: 202. Further provided herein is an antibody or antigen binding fragment thereof that binds to tumor necrosis factor-like protein 1A (TL1A), comprising a heavy chain variable domain comprising SEQ ID NO: 116, and a light chain variable domain comprising SEQ ID NOS: 201. Further provided herein is an antibody or antigen binding fragment thereof that binds to tumor necrosis factor-like protein 1A (TL1A), comprising a heavy chain variable domain comprising SEQ ID NO: 117, and a light chain variable domain comprising SEQ ID NOS: 201. Further provided herein is an antibody or antigen binding fragment thereof that binds to tumor necrosis factor-like protein 1A (TL1A), comprising a heavy chain variable domain comprising SEQ ID NO: 118, and a light chain variable domain comprising SEQ ID NOS: 204. Further provided herein is an antibody or antigen binding fragment thereof that binds to tumor necrosis factor-like protein 1A (TL1A), comprising a heavy chain variable domain comprising SEQ ID NO: 114, and a light chain variable domain comprising SEQ ID NOS: 204. Further provided herein is an antibody or antigen binding fragment thereof that binds to tumor necrosis factor-like protein 1A (TL1A), comprising a heavy chain variable domain comprising SEQ ID NO: 102, and a light chain variable domain comprising SEQ ID NOS: 204. Further provided herein is an antibody or antigen binding fragment thereof that binds to tumor necrosis factor-like protein 1A (TL1A), comprising a heavy chain variable domain comprising SEQ ID NO: 104, and a light chain variable domain comprising SEQ ID NOS: 204. Further provided herein is an antibody or antigen binding fragment thereof that binds to tumor necrosis factor-like protein 1A (TL1A), comprising a heavy chain variable domain comprising SEQ ID NO: 119, and a light chain variable domain comprising SEQ ID NOS: 204. Further provided herein is an antibody or antigen binding fragment thereof that binds to tumor necrosis factor-like protein 1A (TL1A), comprising a heavy chain variable domain comprising SEQ ID NO: 119, and a light chain variable domain comprising SEQ ID NOS: 201. Further provided herein is an antibody or antigen binding fragment thereof that binds to tumor necrosis factor-like protein 1A (TL1A), comprising a heavy chain variable domain comprising SEQ ID NO: 101, and a light chain variable domain comprising SEQ ID NOS: 204. Further provided herein is an antibody or antigen binding fragment thereof that binds to tumor necrosis factor-like protein 1A (TL1A), comprising a heavy chain variable domain comprising SEQ ID NO: 105, and a light chain variable domain comprising SEQ ID NOS: 204. Further provided herein is an antibody or antigen binding fragment thereof that binds to tumor necrosis factor-like protein 1A (TL1A), comprising a heavy chain variable domain comprising SEQ ID NO: 120, and a light chain variable domain comprising SEQ ID NOS: 204. Further provided herein is an antibody or antigen binding fragment thereof that binds to tumor necrosis factor-like protein 1A (TL1A), comprising a heavy chain variable domain comprising SEQ ID NO: 121, and a light chain variable domain comprising SEQ ID NOS: 202. Further provided herein is an antibody or antigen binding fragment thereof that binds to tumor necrosis factor-like protein 1A (TL1A), comprising a heavy chain variable domain comprising SEQ ID NO: 122, and a light chain variable domain comprising SEQ ID NOS: 202. Further provided herein is an antibody or antigen binding fragment thereof that binds to tumor necrosis factor-like protein 1A (TL1A), comprising a heavy chain variable domain comprising SEQ ID NO: 122, and a light chain variable domain comprising SEQ ID NOS: 204. Further provided herein is an antibody or antigen binding fragment thereof that binds to tumor necrosis factor-like protein 1A (TL1A), comprising a heavy chain variable domain comprising SEQ ID NO: 123, and a light chain variable domain comprising SEQ ID NOS: 202. Further provided herein is an antibody or antigen binding fragment thereof that binds to tumor necrosis factor-like protein 1A (TL1A), comprising a heavy chain variable domain comprising SEQ ID NO: 124, and a light chain variable domain comprising SEQ ID NOS: 202. Further provided herein is an antibody or antigen binding fragment thereof that binds to tumor necrosis factor-like protein 1A (TL1A), comprising a heavy chain variable domain comprising SEQ ID NO: 125, and a light chain variable domain comprising SEQ ID NOS: 205. Further provided herein is an antibody or antigen binding fragment thereof that binds to tumor necrosis factor-like protein 1A (TL1A), comprising a heavy chain variable domain comprising SEQ ID NO: 116, and a light chain variable domain comprising SEQ ID NOS: 205. Further provided herein is an antibody or antigen binding fragment thereof that binds to tumor necrosis factor-like protein 1A (TL1A), comprising a heavy chain variable domain comprising SEQ ID NO: 117, and a light chain variable domain comprising SEQ ID NOS: 205. Further provided herein is an antibody or antigen binding fragment thereof that binds to tumor necrosis factor-like protein 1A (TL1A), comprising a heavy chain variable domain comprising SEQ ID NO: 126, and a light chain variable domain comprising SEQ ID NOS: 205. Further provided herein is an antibody or antigen binding fragment thereof that binds to tumor necrosis factor-like protein 1A (TL1A), comprising a heavy chain variable domain comprising SEQ ID NO: 127, and a light chain variable domain comprising SEQ ID NOS: 205. Further provided herein is an antibody or antigen binding fragment thereof that binds to tumor necrosis factor-like protein 1A (TL1A), comprising a heavy chain variable domain comprising SEQ ID NO: 127, and a light chain variable domain comprising SEQ ID NOS: 201. Further provided herein is an antibody or antigen binding fragment thereof that binds to tumor necrosis factor-like protein 1A (TL1A), comprising a heavy chain variable domain comprising SEQ ID NO: 121, and a light chain variable domain comprising SEQ ID NOS: 201. Further provided herein is an antibody or antigen binding fragment thereof that binds to tumor necrosis factor-like protein 1A (TL1A), comprising a heavy chain variable domain comprising SEQ ID NO: 122, and a light chain variable domain comprising SEQ ID NOS: 205. Further provided herein is an antibody or antigen binding fragment thereof that binds to tumor necrosis factor-like protein 1A (TL1A), comprising a heavy chain variable domain comprising SEQ ID NO: 122, and a light chain variable domain comprising SEQ ID NOS: 201. Further provided herein is an antibody or antigen binding fragment thereof that binds to tumor necrosis factor-like protein 1A (TL1A), comprising a heavy chain variable domain comprising SEQ ID NO: 122, and a light chain variable domain comprising SEQ ID NOS: 206. Further provided herein is an antibody or antigen binding fragment thereof that binds to tumor necrosis factor-like protein 1A (TL1A), comprising a heavy chain variable domain comprising SEQ ID NO: 124, and a light chain variable domain comprising SEQ ID NOS: 205. Further provided herein is an antibody or antigen binding fragment thereof that binds to tumor necrosis factor-like protein 1A (TL1A), comprising a heavy chain variable domain comprising SEQ ID NO: 124, and a light chain variable domain comprising SEQ ID NOS: 201. Further provided herein is an antibody or antigen binding fragment thereof that binds to tumor necrosis factor-like protein 1A (TL1A), comprising a heavy chain variable domain comprising SEQ ID NO: 128, and a light chain variable domain comprising SEQ ID NOS: 205. Further provided herein is an antibody or antigen binding fragment thereof that binds to tumor necrosis factor-like protein 1A (TL1A), comprising a heavy chain variable domain comprising SEQ ID NO: 128, and a light chain variable domain comprising SEQ ID NOS: 206. Further provided herein is an antibody or antigen binding fragment thereof that binds to tumor necrosis factor-like protein 1A (TL1A), comprising a heavy chain variable domain comprising SEQ ID NO: 129, and a light chain variable domain comprising SEQ ID NOS: 205. Further provided herein is an antibody or antigen binding fragment thereof that binds to tumor necrosis factor-like protein 1A (TL1A), comprising a heavy chain variable domain comprising SEQ ID NO: 130, and a light chain variable domain comprising SEQ ID NOS: 205. Further provided herein is an antibody or antigen binding fragment thereof that binds to tumor necrosis factor-like protein 1A (TL1A), comprising a heavy chain variable domain comprising SEQ ID NO: 131, and a light chain variable domain comprising SEQ ID NOS: 205. Further provided herein is an antibody or antigen binding fragment thereof that binds to tumor necrosis factor-like protein 1A (TL1A), comprising a heavy chain variable domain comprising SEQ ID NO: 132, and a light chain variable domain comprising SEQ ID NOS: 205. Further provided herein is an antibody or antigen binding fragment thereof that binds to tumor necrosis factor-like protein 1A (TL1A), comprising a heavy chain variable domain comprising SEQ ID NO: 133, and a light chain variable domain comprising SEQ ID NOS: 205. Further provided herein is an antibody or antigen binding fragment thereof that binds to tumor necrosis factor-like protein 1A (TL1A), comprising a heavy chain variable domain comprising SEQ ID NO: 134, and a light chain variable domain comprising SEQ ID NOS: 205. Further provided herein is an antibody or antigen binding fragment thereof that binds to tumor necrosis factor-like protein 1A (TL1A), comprising a heavy chain variable domain comprising SEQ ID NO: 135, and a light chain variable domain comprising SEQ ID NOS: 205. Further provided herein is an antibody or antigen binding fragment thereof that binds to tumor necrosis factor-like protein 1A (TL1A), comprising a heavy chain variable domain comprising SEQ ID NO: 132, and a light chain variable domain comprising SEQ ID NOS: 201. Further provided herein is an antibody or antigen binding fragment thereof that binds to tumor necrosis factor-like protein 1A (TL1A), comprising a heavy chain variable domain comprising SEQ ID NO: 126, and a light chain variable domain comprising SEQ ID NOS: 201. Further provided herein is an antibody or antigen binding fragment thereof that binds to tumor necrosis factor-like protein 1A (TL1A), comprising a heavy chain variable domain comprising SEQ ID NO: 130, and a light chain variable domain comprising SEQ ID NOS: 201.

[1093] Further provided herein is an antibody or antigen binding fragment thereof that binds to tumor necrosis factor-like protein 1A (TL1A), comprising a heavy chain domain comprising any one of SEQ ID NOs: 501-513, and a light chain domain comprising SEQ ID NOS: 514.

[1094] In another aspect, provided herein is an antibody or antigen binding fragment thereof that binds to TL1A, comprising a heavy chain variable region comprising: (a) an HCDR1 comprising an amino acid sequence set forth by SEQ ID NO: 1; (b) an HCDR2 comprising an amino acid sequence set forth by any one of SEQ ID NOS: 2-5; and (c) an HCDR3 comprising an amino acid sequence set forth by any one of SEQ ID NOS: 6-9; and the light chain variable region comprises: (d) an LCDR1 comprising an amino acid sequence set forth by SEQ ID NO: 10; (e) an LCDR2 comprising an amino acid sequence set forth by SEQ ID NO: 11; (f) an LCDR3 comprising an amino acid sequence set forth by any one of SEQ ID NOS: 12-15; and a fragment crystallizable (Fc) region comprising reduced antibody-dependent cell-mediated cytotoxicity (ADCC) function as compared to human IgG1 and/or reduced complement-dependent cytotoxicity (CDC) as compared to human IgG1. In some embodiments, the human IgG1 comprises SEQ ID NO: 320. In some embodiments, the ADCC function of the Fc region comprising reduced ADCC is at least about 50% reduced as compared to human IgG1. In some embodiments, the CDC function of the Fc region comprising reduced ADCC is at least about 50% reduced as compared to human IgG1. In some embodiments, the Fc region comprises a human IgG1 comprising (a) 297A, 297Q, or 297D, (b) 279F, 279K, or 279L, (c) 228P, (d) 235A, 235E, 235G, 235Q, 235R, or 235S, (e) 237A, 237E, 237K, 237N, or 237R, (f) 234A, 234V, or 234F, (g) 233P, (h) 328A, (i) 327Q or 327T, (j) 329A, 329G, 329Y, (k) 331S, (1) 236F or 236R, (m) 238A, 238E, 238G, 238H, 238I, 238V, 238 W, or 238Y, (n) 248A, (o) 254D, 254E, 254G, 254H, 254I, 254N, 254P, 254Q, 254T, or 254V, (p) 255N, (q) 256H, 256K, 256R, or 256V, (r) 264S, (s) 265H, 265K, 265S, 265Y, or 265A, (t) 267G, 267H, 267I, or 267K, (u) 268K, (v) 269N or 269Q, (w) 270A, 270G, 270M, or 270N, (x) 271T, (y) 272N, (z) 292E, 292F, 292G, or 292I, (aa) 293S, (bb) 301 W, (cc) 304E, (dd) 311E, 311G, or 311S, (ee) 316F, (ff) 328V, (gg) 330R, (hh) 339E or 339L, (ii) 343I or 343V, (jj) 373A, 373G, or 373S, (kk) 376E, 376 W, or 376Y, (11) 380D, (mm) 382D or 382P, (nn) 385P, (oo) 424H, 424M, or 424V, (pp) 434I, (qq) 438G, (rr) 439E, 439H, or 439Q, (ss) 440A, 440D, 440E, 440F, 440M, 440T, or 440V, (tt) E233P, (uu) L235E, (vv) L234A and L235A, (ww) L234A, L235A, and G237A, (xx) L234A, L235A, and P329G, (yy) L234F, L235E, and P331 S, (zz) L234A, L235E, and G237A, (aaa), L234A, L235E, G237A, and P331S (bbb) L234A, L235A, G237A, P238S, H268A, A330S, and P331S (IgG1σ), (ccc) L234A, L235A, and P329A, (ddd) G236R and L328R, (eee) G237A, (fff) F241A, (ggg) V264A, (hhh) D265A, (iii) D265A and N297A, (jjj) D265A and N297G, (kkk) D270A, (111) A330L, (mmm) P331A or P331S, or (nnn) any combination of (a)-(uu), per Kabat numbering. In some embodiments, the antibody of antigen binding fragment comprises a (i) human IgG4 Fc region or (ii) a human IgG4 Fc region comprising (a) S228P and L235E, or (b) S228P, F234A, and L235A, per Kabat numbering. In some embodiments, the antibody of antigen binding fragment comprises a human IgG2 Fc region; IgG2-IgG4 cross-subclass Fc region; IgG2-IgG3 cross-subclass Fc region; IgG2 comprising H268Q, V309L, A330S, P331S (IgG2m4); or IgG2 comprising V234A, G237A, P238S, H268A, V309L, A330S, P331S (IgG26). In some embodiments, the antibody of antigen binding fragment comprises a human Fc region comprising high mannose glycosylation. In some embodiments, the Fc region comprises a human IgG1 with a substitution selected from 297A, 297Q, 297D, 279F, 279K, 279L, 228P, 235A, 235E, 235G, 235Q, 235R, 235S, 237A, 237E, 237K, 237N, 237R, 268K, 269N, 269Q, 270A, 270G, 270M, 270N, 424H, 424M, and 424V, per Kabat numbering. In some embodiments, the Fc region comprises a human IgG1 with a substitution selected from 271T, 272N, 292E, 292F, 292G, 292I, 293S, 301 W, 304E, 311E, 311G, 311S, 255N, 256H, 256K, 256R, 256V, 316F, 328V, 330R, 339E, 339L, 343I, 343V, 373A, 373G, 373S, 376E, 376 W, 376Y, 380D, 382D, 382P, 385P, 234A, 234V, 234F, 233P, 328A, 327Q and 327T, per Kabat numbering. In some embodiments, the Fc region comprises a human IgG1 with a substitution selected from 329A, 329G, 329Y, 331S, 236F, 236R, 238A, 238E, 238G, 238H, 238I, 238V, 238 W, 238Y, 248A, 254D, 254E, 254G, 254H, 254I, 254N, 254P, 254Q, 254T, 254V, 264S, 265H, 265K, 265S, 265Y, 265A, 267G, 267H, 267I, 267K, 434I, 438G, 439E, 439H, 439Q, 440A, 440D, 440E, 440F, 440M, 440T, and 440V, per Kabat numbering. In some embodiments, the antibody or antigen binding fragment comprises a sequence at least about 90%, 91%, 92%, 93%, 94%, 95%, 96%, 97%, 98%, 99%, or 100% identical to any one of SEQ ID NOS: 320-362. In some embodiments, HCDR1 comprises SEQ ID NO: 1. In some embodiments, HCDR2 comprises SEQ ID NO: 2. In some embodiments, HCDR2 comprises SEQ ID NO: 3. In some embodiments, HCDR2 comprises SEQ ID NO: 4. In some embodiments, HCDR2 comprises SEQ ID NO: 5. In some embodiments, HCDR3 comprises SEQ ID NO: 6. In some embodiments, HCDR3 comprises SEQ ID NO: 7. In some embodiments, HCDR3 comprises SEQ ID NO: 8. In some embodiments, HCDR3 comprises SEQ ID NO: 9. In some embodiments, LCDR1 comprises SEQ ID NO: 10. In some embodiments, LCDR2 comprises SEQ ID NO: 11. In some embodiments, LCDR3 comprises SEQ ID NO: 12. In some embodiments, LCDR3 comprises SEQ ID NO: 13. In some embodiments, LCDR3 comprises SEQ ID NO: 14. In some embodiments, LCDR3 comprises SEQ ID NO: 15.

[1095] In another aspect, provided herein is an antibody or antigen binding fragment thereof that binds to TL1A, comprising a heavy chain variable region comprising: (a) an HCDR1 comprising an amino acid sequence set forth by SEQ ID NO: 1; (b) an HCDR2 comprising an amino acid sequence set forth by any one of SEQ ID NOS: 2-5; and (c) an HCDR3 comprising an amino acid sequence set forth by any one of SEQ ID NOS: 6-9; and the light chain variable region comprises: (d) an LCDR1 comprising an amino acid sequence set forth by SEQ ID NO: 10; (e) an LCDR2 comprising an amino acid sequence set forth by SEQ ID NO: 11; and (f) an LCDR3 comprising an amino acid sequence set forth by any one of SEQ ID NOS: 12-15. In some embodiments, the heavy chain variable region comprises human IGHV1-46*02 framework or a modified human IGHV1-46*02 framework. In some embodiments, the light chain variable framework region comprising a human IGKV3-20 framework or a modified human IGKV3-20 framework. In some embodiments, the heavy chain variable region comprises one of more of the following amino acids: 1E, 45K, 47R, 55I, 78A, 80I, 82T, 89A, 91L, per Aho or Kabat numbering. In some embodiments, the heavy chain variable region comprises 1E. In some embodiments, the heavy chain variable region comprises 45K. In some embodiments, the heavy chain variable region comprises 47R. In some embodiments, the heavy chain variable region comprises 55I. In some embodiments, the heavy chain variable region comprises 78A. In some embodiments, the heavy chain variable region comprises 80I. In some embodiments, the heavy chain variable region comprises 82T. In some embodiments, the heavy chain variable region comprises 89A. In some embodiments, the heavy chain variable region comprises 91L. In some embodiments, the light chain variable region comprises one or more of the following amino acids: 54P and 55W, per Aho or Kabat numbering. In some embodiments, the light chain variable region comprises 54P. In some embodiments, the light chain variable region comprises 55 W. In some embodiments, the HCDR2 comprises SEQ ID NO: 2. In some embodiments, the HCDR2 comprises SEQ ID NO: 3. In some embodiments, the HCDR2 comprises SEQ ID NO: 4. In some embodiments, the HCDR2 comprises SEQ ID NO: 5. In some embodiments, the HCDR3 comprises SEQ ID NO: 6. In some embodiments, the HCDR3 comprises SEQ ID NO: 7. In some embodiments, the HCDR3 comprises SEQ ID NO: 8. In some embodiments, the HCDR3 comprises SEQ ID NO: 9. In some embodiments, the LCDR3 comprises SEQ ID NO: 12. In some embodiments, the LCDR3 comprises SEQ ID NO: 13. In some embodiments, the LCDR3 comprises SEQ ID NO: 14. In some embodiments, LCDR3 comprises SEQ ID NO: 15.

[1096] In some embodiments, an antibody or antigen binding fragment described herein comprises a human IgG1 Fc region comprising (a) 297A, 297Q, or 297D, (b) 279F, 279K, or 279L, (c) 228P, (d) 235A, 235E, 235G, 235Q, 235R, or 235S, (e) 237A, 237E, 237K, 237N, or 237R, (f) 234A, 234V, or 234F, (g) 233P, (h) 328A, (i) 327Q or 327T, (j) 329A, 329G, 329Y, (k) 331S, (1) 236F or 236R, (m) 238A, 238E, 238G, 238H, 238I, 238V, 238 W, or 238Y, (n) 248A, (o) 254D, 254E, 254G, 254H, 254I, 254N, 254P, 254Q, 254T, or 254V, (p) 255N, (q) 256H, 256K, 256R, or 256V, (r) 264S, (s) 265H, 265K, 265S, 265Y, or 265A, (t) 267G, 267H, 267I, or 267K, (u) 268K, (v) 269N or 269Q, (w) 270A, 270G, 270M, or 270N, (x) 271T, (y) 272N, (z) 292E, 292F, 292G, or 292I, (aa) 293S, (bb) 301 W, (cc) 304E, (dd) 311E, 311G, or 311S, (ee) 316F, (ff) 328V, (gg) 330R, (hh) 339E or 339L, (ii) 343I or 343V, (jj) 373A, 373G, or 373S, (kk) 376E, 376 W, or 376Y, (11) 380D, (mm) 382D or 382P, (nn) 385P, (oo) 424H, 424M, or 424V, (pp) 434I, (qq) 438G, (rr) 439E, 439H, or 439Q, (ss) 440A, 440D, 440E, 440F, 440M, 440T, or 440V, (tt) E233P, (uu) L235E, (vv) L234A and L235A, (ww) L234A, L235A, and G237A, (xx) L234A, L235A, and P329G, (yy) L234F, L235E, and P331 S, (zz) L234A, L235E, and G237A, (aaa), L234A, L235E, G237A, and P331 S (bbb) L234A, L235A, G237A, P238S, H268A, A330S, and P331 S (IgG1σ), (ccc) L234A, L235A, and P329A, (ddd) G236R and L328R, (eee) G237A, (fff) F241A, (ggg) V264A, (hhh) D265A, (iii) D265A and N297A, (jjj) D265A and N297G, (kkk) D270A, (111) A330L, (mmm) P331A or P331S, or (nnn) any combination of (a)-(uu), per Kabat numbering. In some embodiments, an antibody of antigen binding fragment herein comprises a (i) human IgG4 Fc region or (ii) a human IgG4 Fc region comprising (a) S228P and L235E, or (b) S228P, F234A, and L235A, per Kabat numbering. In some embodiments, an antibody of antigen binding fragment herein comprises a human IgG2 Fc region; IgG2-IgG4 cross-subclass Fc region; IgG2-IgG3 cross-subclass Fc region; IgG2 comprising H268Q, V309L, A330S, P331S (IgG2m4); or IgG2 comprising V234A, G237A, P238S, H268A, V309L, A330S, P331S (IgG26). In some embodiments, an antibody of antigen binding fragment herein comprises a human Fc region comprising high mannose glycosylation. In some embodiments, any of the antibody or antigen binding fragments described herein comprise a human IgG4 Fc region.

[1097] In some embodiments, an antibody or antigen binding fragment described herein comprises a human IgG1 with a substitution selected from 297A, 297Q, 297D, 279F, 279K, 279L, 228P, 235A, 235E, 235G, 235Q, 235R, 235S, 237A, 237E, 237K, 237N, 237R, 268K, 269N, 269Q, 270A, 270G, 270M, 270N, 424H, 424M, and 424V, per Kabat numbering. In some embodiments, an antibody or antigen binding fragment described herein comprises a human IgG1 with a substitution selected from 271T, 272N, 292E, 292F, 292G, 292I, 293S, 301 W, 304E, 311E, 311G, 311S, 255N, 256H, 256K, 256R, 256V, 316F, 328V, 330R, 339E, 339L, 343I, 343V, 373A, 373G, 373S, 376E, 376 W, 376Y, 380D, 382D, 382P, 385P, 234A, 234V, 234F, 233P, 328A, 327Q and 327T, per Kabat numbering. In some embodiments, an antibody or antigen binding fragment described herein comprises a human IgG1 with a substitution selected from 329A, 329G, 329Y, 331S, 236F, 236R, 238A, 238E, 238G, 238H, 238I, 238V, 238 W, 238Y, 248A, 254D, 254E, 254G, 254H, 254I, 254N, 254P, 254Q, 254T, 254V, 264S, 265H, 265K, 265S, 265Y, 265A, 267G, 267H, 267I, 267K, 434I, 438G, 439E, 439H, 439Q, 440A, 440D, 440E, 440F, 440M, 440T, and 440V, per Kabat numbering.

[1098] In some embodiments, an antibody or antigen binding fragment described herein comprises a Fc region comprising a sequence at least about 90%, 91%, 92%, 93%, 94%, 95%, 96%, 97%, 98%, 99%, or 100% identical to any one of SEQ ID NOS: 320-362.

[1099] In some embodiments, an antibody or antigen binding fragment described herein comprises at least about 80% monomeric fraction as determined by size exclusion chromatography. In some embodiments, an antibody or antigen binding fragment described herein comprises at least about 85%, 90%, 91%, 92%, 93%, 94%, 95%, 96%, 97%, 98%, or 99% monomeric fraction. In some embodiments, the size exclusion chromatography comprises injecting purified antibody or antigen binding fragment onto a size exclusion column, wherein the antibody or antigen binding fragment is purified by protein A. In some embodiments, the antibody or antigen binding fragment is purified as described in Example 2. In some embodiments, the antibody or antigen binding fragment is expressed under conditions described in Example 2. In some embodiments, the size exclusion chromatography column has an inner diameter of 4.6 mm. In some embodiments, the size exclusion chromatography column has a length of 150 mm. In some embodiments, the size exclusion chromatography column has a pore size of 200 Å. In some embodiments, the size exclusion chromatography column has a particle size of 1.7 micrometer. In some embodiments, the size exclusion chromatography column is ACQUITY UPLC BEH200 SEC column. In some embodiments, the antibody or antigen binding fragment is injected at a total volume of 15 μL. In some embodiments, the antibody or antigen binding fragment is injected at a concentration of about 0.1 μg/μL to about 1.0 μg/μL. In some embodiments, the size exclusion chromatography is performed on a Shimadzu UPLC instrument. In some embodiments, the size exclusion chromatography is performed at a flow rate of 0.2 mL/min. In some embodiments, the size exclusion chromatography is performed at a column oven temperature of 30° C. In some embodiments, the percentage of monomer is calculated using Shimadzu software. In some embodiments, the size exclusion chromatography is performed as described in Example 2.

[1100] In some embodiments, an antibody or antigen binding fragment described herein expresses at least about 20 ug/ml total antibody. In some embodiments, an antibody or antigen binding fragment described herein expresses between about 20 ug/ml and 70 ug/mL total antibody. In some embodiments, the antibody or antigen binding fragment is expressed in FreeStyle 293-F cells. In some embodiments, the antibody or antigen binding fragment is expressed as described in Example 2. In some embodiments, the antibody or antigen binding fragment expression level is quantified using Enzyme-Linked Immunosorbent assay (ELISA). In some embodiments, the ELISA comprises coating a surface of a substrate with a capture antibody that binds to a human or humanized antibody, applying the antibody or antigen binding fragment to the substrate, and applying to the substrate a second antibody that binds to a human or humanized antibody. In some embodiments, the capture antibody comprises an anti-kappa antibody. In some embodiments, the second antibody comprises an anti-Fc antibody. In some embodiments, the ELISA is performed as described in Example 2.

[1101] Further provided herein are methods of treating inflammatory bowel disease (IBD) in a subject in need thereof, the method comprising administering to the subject an antibody or antigen binding fragment described herein. In some embodiments, the IBD comprises Crohn's Disease. In some embodiments, the IBD comprises ulcerative colitis.

[1102] Also provided are antibodies or antigen binding fragments thereof that bind to tumor necrosis factor-like protein 1A (TL1A), comprising a heavy chain variable domain comprising an amino acid sequence at least 96% identical to SEQ ID NO: 104, and a light chain variable domain comprising an amino acid sequence at least 97% identical to SEQ ID NO: 201. In some embodiments, the heavy chain variable domain comprises an amino acid sequence at least 97% identical to SEQ ID NO: 104. In some embodiments, the heavy chain variable domain comprises an amino acid sequence at least 98% identical to SEQ ID NO: 104. In some embodiments, the heavy chain variable domain comprises an amino acid sequence at least 99% identical to SEQ ID NO: 104. In some embodiments, the heavy chain variable domain comprises SEQ ID NO: 104. In some embodiments, the light chain variable domain comprises an amino acid sequence at least 98% identical to SEQ ID NO: 201. In some embodiments, the light chain variable domain comprises an amino acid sequence at least about 99% identical to SEQ ID NO: 201. In some embodiments, the light chain variable domain comprises SEQ ID NO: 201.

[1103] Further provided are antibodies or antigen binding fragments thereof that bind to tumor necrosis factor-like protein 1A (TL1A), comprising a heavy chain variable domain comprising an amino acid sequence at least about 99% identical to any one of SEQ ID NOS: 101-135, and a light chain variable domain comprising an amino acid sequence at least about 99% identical to any one of SEQ ID NOS: 201-206. Table 16 and Table 17 set forth exemplary variable region amino acid sequences of anti-TL1A antibodies.

[1104] Provided are also antibodies or antigen binding fragments, as described herein, further comprising a human IgG1 Fc region comprising (a) 297A, 297Q, 297G, or 297D, (b) 279F, 279K, or 279L, (c) 228P, (d) 235A, 235E, 235G, 235Q, 235R, or 235S, (e) 237A, 237E, 237K, 237N, or 237R, (f) 234A, 234V, or 234F, (g) 233P, (h) 328A, (i) 327Q or 327T, (j) 329A, 329G, 329Y, or 329R (k) 331S, (1) 236F or 236R, (m) 238A, 238E, 238G, 238H, 238I, 238V, 238 W, or 238Y, (n) 248A, (o) 254D, 254E, 254G, 254H, 254I, 254N, 254P, 254Q, 254T, or 254V, (p) 255N, (q) 256H, 256K, 256R, or 256V, (r) 264S, (s) 265H, 265K, 265S, 265Y, or 265A, (t) 267G, 267H, 267I, or 267K, (u) 268K, (v) 269N or 269Q, (w) 270A, 270G, 270M, or 270N, (x) 271T, (y) 272N, (z) 292E, 292F, 292G, or 292I, (aa) 293S, (bb) 301 W, (cc) 304E, (dd) 311E, 311G, or 311S, (ee) 316F, (ff) 328V, (gg) 330R, (hh) 339E or 339L, (ii) 343I or 343V, (jj) 373A, 373G, or 373S, (kk) 376E, 376 W, or 376Y, (11) 380D, (mm) 382D or 382P, (nn) 385P, (oo) 424H, 424M, or 424V, (pp) 434I, (qq) 438G, (rr) 439E, 439H, or 439Q, (ss) 440A, 440D, 440E, 440F, 440M, 440T, or 440V, (tt) E233P, (uu) L235E, (vv) L234A and L235A, (ww) L234A, L235A, and G237A, (xx) L234A, L235A, and P329G, (yy) L234F, L235E, and P331 S, (zz) L234A, L235E, and G237A, (aaa), L234A, L235E, G237A, and P331S (bbb) L234A, L235A, G237A, P238S, H268A, A330S, and P331 S (IgG1σ, (ccc) L234A, L235A, and P329A, (ddd) G236R and L328R, (eee) G237A, (fff) F241A, (ggg) V264A, (hhh) D265A, (iii) D265A and N297A, (jjj) D265A and N297G, (kkk) D270A, (111) A330L, (mmm) P331A or P331S, or (nnn) any combination of (a)-(uu), per Kabat numbering. In some embodiments, the antibodies comprise a human IgG4 Fc region. In some embodiments, the antibodies a Fc region comprising a sequence at least about 90%, 91%, 92%, 93%, 94%, 95%, 96%, 97%, 98%, 99%, or 100% identical to any one of SEQ ID NOS: 320-362. In some embodiments, the antibodies comprise at least about 80% monomeric fraction as determined by size exclusion chromatography. In some embodiments, the antibodies are expressed in an amount at least about 20 ug/ml total antibody, optionally about 20 ug/ml and 70 ug/mL total antibody.

### Antibody Properties

[1105] In various embodiments, the anti-TL1A antibody is an antagonist of a TL1A receptor, such as, but not limited to, DR3 and TR6/DcR3. In certain embodiments, the antibody inhibits at least about 10%, at least about 20%, at least about 30%, at least about 50%, at least about 75%, at least about 90%, or about 100% of one or more activity of the bound TL1A receptor. In certain embodiments, the antibodies inhibit TL1A activation as measured by interferon gamma release in human blood. In certain embodiments, the antibody inhibits interferon gamma release in human blood at an IC₅₀ of between about 1 nanomolar and about 30 picomolar. In certain embodiments, the antibody inhibits interferon gamma release in human blood at an IC₅₀ of between about 500 picomolar and about 30 picomolar. In certain embodiments, the antibody inhibits interferon gamma release in human blood at an IC₅₀ of between about 200 picomolar and about 30 picomolar. In certain embodiments, the antibody inhibits interferon gamma release in human blood at an IC₅₀ of less than or equal to about 200 picomolar. In certain embodiments, the antibody inhibits interferon gamma release in human blood at an IC₅₀ of less than or equal to about 100 picomolar.

[1106] In various embodiments, an anti-TL1A antibody provided herein has a binding affinity to human TL1A of less than about 1E⁻⁷, 1E⁻⁸, 1E⁻⁹, or 1E⁻¹⁰ Kd. In some cases, the binding affinity is from about 1E⁻⁹ to about 1E⁻¹⁰ Kd. In some embodiments, an anti-TL1A antibody provided herein has a binding affinity to murine TL1A and/or rat TL1A of less than about 1E⁻⁷, 1E⁻⁸, 1E⁻⁹, 1E⁻¹⁰, or 1E⁻¹ Kd. Methods for determining binding affinity are exemplified herein, including in Example 2.

[1107] In various embodiments, an anti-TL1A antibody provided herein comprises at least about 80% monomeric fraction after expression and purification as described in Example 2 or elsewhere herein. In various embodiments, an anti-TL1A antibody provided herein comprises at least about 85% monomeric fraction after expression and purification as described in Example 2 or elsewhere herein. In various embodiments, an anti-TL1A antibody provided herein comprises at least about 90% monomeric fraction after expression and purification as described in Example 2 or elsewhere herein. In various embodiments, an anti-TL1A antibody provided herein comprises at least about 91%, 92%, 93%, 94%, 95%, 96%, 97%, 98%, 99%, or 100% monomeric fraction after expression and purification as described in Example 2 or elsewhere herein.

[1108] In various embodiments, an anti-TL1A antibody provided herein has at least about 2 μg/mL expression as determined by the method disclosed herein. In some embodiments, the anti-TL1A antibody has about 2 μg/mL to about 60 μg/mL expression as determined by the method disclosed herein. In some embodiments, the anti-TL1A antibody has about 5 μg/mL to about 60 μg/mL expression as determined by the method disclosed herein. In some embodiments, the anti-TL1A antibody has about 10 μg/mL to about 60 μg/mL expression as determined by the method disclosed herein. In some embodiments, the anti-TL1A antibody has at least about 5 μg/mL expression as determined by the method disclosed herein. In some embodiments, the anti-TL1A antibody has at least about 10 μg/mL expression as determined by the method disclosed herein. In some embodiments, the anti-TL1A antibody has at least about 15 μg/mL expression as determined by the method disclosed herein. In some embodiments, the anti-TL1A antibody has at least about 20 μg/mL expression as determined by the method disclosed herein. In some embodiments, the anti-TL1A antibody expresses between about 2 μg/mL and about 50 μg/mL, between about 2 μg/mL and about 40 μg/mL, between about 2 μg/mL and about 30 μg/mL expression, between about 2 μg/mL and about 20 μg/mL, between about 5 μg/mL and about 50 μg/mL, between about 5 μg/mL and about 40 μg/mL, between about 5 μg/mL and about 30 μg/mL, between about 10 μg/mL and about 50 μg/mL, between about 10 μg/mL and about 40 μg/mL, or between about 10 μg/mL and about 30 μg/mL as determined by the method disclosed herein. In some embodiments, the anti-TL1A antibody has about 2, 3, 4, 5, 6, 7, 8, 9, 10, 11, 12, 13, 14, 15, 16, 17, 18, 19, 20, 21, 22, 23, 24, 25, 26, 27, 28, 29, 30 μg/mL expression as determined by the method disclosed herein. Methods disclosed herein include those described in Example 2.

[1109] In various embodiments, an anti-TL1A antibody provided herein is humanized and has less than about 20% non-human sequence in the framework region of each of the heavy chain and light chain variable regions. For instance, the humanized antibody comprises less than about 20% 19%, 18%, 17%, 16%, 15%, 14%, 13%, 12%, 11%, 10% 9% 8% 7% 6%, 5%, 4%, 3%, 2%, or 1% non- human sequence in the framework region of each of the heavy chain and light chain variable regions. As another example, the humanized antibody comprises about or less than about 15, 14, 13, 12, 11, 10, 9, 8, 7, 6, 5, 4, 3, 2, or 1 non-human sequences in the framework region of each of the heavy chain and light chain variable regions. The humanized heavy chain variable domain may comprise IGHV1-46*02 framework with no or fewer than about 10, 9, 8, 7, 6, 5, 4, 3, 2, or 1 non-human mutations. The humanized light chain variable domain may comprise IGKV3-20 framework with no or fewer than about 10, 9, 8, 7, 6, 5, 4, 3, 2, or 1 non-human mutations.

### Assays

[1110] An exemplary screening paradigm for identification of antibody variants that express well in mammalian cells and preserve TL1A binding activity while minimizing the propensity of the antibody to aggregate comprises a five-step process. This screen was performed as detailed in the examples. Briefly, (1) variants were cloned and transiently expressed as intact Ig in 293 cells using small-scale (3 mL, 6-well culture plates) transfections, (2) the expression level of the antibody was assessed in the culture supernatant 96-120 hours after transfection using an antibody quantitation ELISA, (3) the binding of the supernatant antibody variants to human TL1A was assessed by ELISA, (4) the antibody was purified in a single step using Protein A and (5) the material was analyzed by analytical SEC to assess monomer/aggregate content. This approach enabled identification of variants that expressed well, preserved binding to TL1A, and displayed high monomer content.

[1111] Further provided herein are methods for analyzing antibody solubility based on percentage of monomeric fraction. For example, as described in Example 2.

[1112] Further provided herein are assays for quantifying antibody expression. For example, as described in Example 2.

[1113] Further provided herein are assays for quantifying immunogenicity of an antibody.

[1114] The antibodies described herein can be assayed for specific binding by any method known in the art. The immunoassays which can be used include, but are not limited to, competitive and non-competitive assay systems using techniques such as BIAcore analysis, FACS analysis, immunofluorescence, immunocytochemistry, Western blots, radioimmunoassays, ELISA, “sandwich” immunoassays, immunoprecipitation assays, precipitation reactions, gel diffusion precipitin reactions, immunodiffusion assays, agglutination assays, complement-fixation assays, immunoradiometric assays, fluorescent immunoassays, and protein A immunoassays. Such assays are provided in for e.g., Ausubel et al., eds, 1994, Current Protocols in Molecular Biology, Vol. 1, John Wiley & Sons, Inc., New York.

### Additional Therapeutic Agent

[1115] A therapeutic agent may be used alone or in combination with an additional therapeutic agent. The therapeutic agents may be administered together or sequentially. The combination therapies may be administered within the same day, or may be administered one or more days, weeks, months, or years apart. In some cases, a therapeutic agent provided herein is administered if the subject is determined to be non-responsive to a first line of therapy, e.g., such as TNF inhibitor. Such determination may be made by treatment with the first line therapy and monitoring of disease state and/or diagnostic determination that the subject would be non-responsive to the first line therapy.

[1116] In some embodiments, the additional therapeutic agent comprises an anti-TNF therapy, e.g., an anti-TNFα therapy. In some embodiments, the additional therapeutic agent comprises a second-line treatment to an anti-TNF therapy. In some embodiments, the additional therapeutic agent comprises an immunosuppressant, or a class of drugs that suppress, or reduce, the strength of the immune system. In some embodiments, the immunosuppressant is an antibody. Non-limiting examples of immunosuppressant therapeutic agents include STELARA® (ustekinumab) azathioprine (AZA), 6-mercaptopurine (6-MP), methotrexate, cyclosporin A. (CsA).

[1117] In some embodiments, the additional therapeutic agent comprises a selective anti-inflammatory drug, or a class of drugs that specifically target pro-inflammatory molecules in the body. In some embodiments, the anti-inflammatory drug comprises an antibody. In some embodiments, the anti-inflammatory drug comprises a small molecule. Non-limiting examples of anti-inflammatory drugs include ENTYVIO (vedolizumab), corticosteroids, aminosalicylates, mesalamine, balsalazide (Colazal) and olsalazine (Dipentum).

### Methods of Generating Antibodies

[1118] In various embodiments, monoclonal antibodies are prepared using methods known in the art, such as, but not limited to the hybridoma method, where a host animal is immunized to elicit the production by lymphocytes of antibodies that will specifically bind to an immunizing antigen (Kohler and Milstein (1975) Nature 256:495). Hybridomas produce monoclonal antibodies directed specifically against a chosen antigen. The monoclonal antibodies are purified from the culture medium or ascites fluid by techniques known in the art, when propagated either in vitro or in vivo.

[1119] In some embodiments, monoclonal antibodies are made using recombinant DNA methods. The polynucleotides encoding a monoclonal antibody are isolated from mature B-cells or hybridoma cells. The isolated polynucleotides encoding the heavy and light chains are then cloned into suitable expression vectors, which when transfected into host cells (e.g., E. coli cells, simian COS cells, Chinese hamster ovary (CHO) cells, or myeloma cells) generate monoclonal antibodies. The polynucleotide(s) encoding a monoclonal antibody can further be modified in a number of different manners using recombinant DNA technology to generate alternative antibodies.

[1120] In various embodiments, a chimeric antibody, a molecule in which different portions are derived from different animal species, such as those having a variable region derived from a murine monoclonal antibody and a human immunoglobulin constant region (e.g., humanized antibodies) can be generated.

[1121] In some embodiments, the anti-TL1A monoclonal antibody is a humanized antibody, to reduce antigenicity and HAMA (human anti-mouse antibody) responses when administered to a human subject. Humanized antibodies can be produced using various techniques known in the art. For example, an antibody is humanized by (1) determining the nucleotide and predicted amino acid sequence of the starting antibody light and heavy variable domains; (2) designing the humanized antibody, e.g., deciding which antibody framework region to use during the humanizing process; (3) the actual humanizing methodologies/techniques; and (4) the transfection and expression of the humanized antibody. In various embodiments, a humanized antibody can be further optimized to decrease potential immunogenicity, while maintaining functional activity, for therapy in humans.

[1122] Humanized antibodies can also be made in transgenic mice containing human immunoglobulin loci that are capable, upon immunization, of producing the full repertoire of human antibodies in the absence of endogenous immunoglobulin production. A humanized antibody may also be obtained by a genetic engineering approach that enables production of affinity-matured human-like polyclonal antibodies in large animals.

[1123] A fully humanized antibody may be created by first designing a variable region amino acid sequence that contains non-human, e.g., rodent-derived CDRs, embedded in human-derived framework sequences. The non-human CDRs provide the desired specificity. Accordingly, in some cases these residues are included in the design of the reshaped variable region essentially unchanged. In some cases, modifications should therefore be restricted to a minimum and closely watched for changes in the specificity and affinity of the antibody. On the other hand, framework residues in theory can be derived from any human variable region. A human framework sequences should be chosen, which is equally suitable for creating a reshaped variable region and for retaining antibody affinity, in order to create a reshaped antibody which shows an acceptable or an even improved affinity. The human framework may be of germline origin, or may be derived from non-germline (e.g., mutated or affinity matured) sequences. Genetic engineering techniques well known to those in the art, for example, but not limited to, phage display of libraries of human antibodies, transgenic mice, human-human hybridoma, hybrid hybridoma, B cell immortalization and cloning, single-cell RT-PCR or HuRAb Technology, may be used to generate a humanized antibody with a hybrid DNA sequence containing a human framework and a non-human CDR.

[1124] In certain embodiments, the anti-TL1A antibody is a human antibody. Human antibodies can be directly prepared using various techniques known in the art. Immortalized human B lymphocytes immunized in vitro or isolated from an immunized individual that produce an antibody directed against a target antigen can be generated.

[1125] Chimeric, humanized and human antibodies may be produced by recombinant expression. Recombinant polynucleotide constructs typically include an expression control sequence operably linked to the coding sequences of antibody chains, including naturally associated or heterologous promoter regions. In certain embodiments, it may be desirable to generate amino acid sequence variants of these humanized antibodies, particularly where these improve the binding affinity or other biological properties of the antibody.

[1126] In certain embodiments, an antibody fragment is used to treat and/or ameliorate IBD. Various techniques are known for the production of antibody fragments. Generally, these fragments are derived via proteolytic digestion of intact antibodies (for example Morimoto et al., 1993, Journal of Biochemical and Biophysical Methods 24:107-117; Brennan et al., 1985, Science, 229:81). Fab, Fv, and scFv antibody fragments can all be expressed in and secreted from E. coli or other host cells, thus allowing the production of large amounts of these fragments. Other techniques for the production of antibody fragments will be apparent to the skilled practitioner.

[1127] According to the present disclosure, techniques can be adapted for the production of single-chain antibodies specific to TL1A. In addition, methods can be adapted for the construction of Fab expression libraries to allow rapid and effective identification of monoclonal Fab fragments with the desired specificity for TL1A, or derivatives, fragments, analogs or homologs thereof. Antibody fragments may be produced by techniques in the art including, but not limited to: (a) a F(ab′) 2 fragment produced by pepsin digestion of an antibody molecule; (b) a Fab fragment generated by reducing the disulfide bridges of an F(ab′) 2 fragment, (c) a Fab fragment generated by the treatment of the antibody molecule with papain and a reducing agent, and (d) FIT fragments.

[1128] Also provided herein are modified antibodies comprising any type of variable region that provides for the association of the antibody with TL1A. Those skilled in the art will appreciate that the modified antibodies may comprise antibodies (e.g., full-length antibodies or immunoreactive fragments thereof) in which at least a fraction of one or more of the constant region domains has been deleted or otherwise altered so as to provide desired biochemical characteristics such as decreasing TL1A. In certain embodiments, the variable regions in both the heavy and light chains are altered by at least partial replacement of one or more CDRs and, if necessary, by partial framework region replacement and sequence changing. In some embodiments, the replaced CDRs may be derived from an antibody of the same class, subclass, from an antibody of a different class, for instance, from an antibody from a different species and/or a combination thereof. In some embodiments, the constant region of the modified antibodies will comprise a human constant region. Modifications to the constant region compatible with this disclosure comprise additions, deletions or substitutions of one or more amino acids in one or more domains.

[1129] In various embodiments, the expression of an antibody or antigen-binding fragment thereof as described herein can occur in either prokaryotic or eukaryotic cells. Suitable hosts include bacterial or eukaryotic hosts, including yeast, insects, fungi, bird and mammalian cells either in vivo, or in situ, or host cells of mammalian, insect, bird or yeast origin. The mammalian cell or tissue can be of human, primate, hamster, rabbit, rodent, cow, pig, sheep, horse, goat, dog or cat origin, but any other mammalian cell may be used. In other embodiments, the antibody or antigen-fragment thereof as described herein may be transfected into the host.

[1130] In some embodiments, the expression vectors are transfected into the recipient cell line for the production of the chimeric, humanized, or composite human antibodies described herein. In various embodiments, mammalian cells can be useful as hosts for the production of antibody proteins, which can include, but are not limited to cells of fibroblast origin, such as Vero (ATCC CRL 81) or CHO-K1 (ATCC CRL 61) cells, HeLa cells and L cells. Exemplary eukaryotic cells that can be used to express polypeptides include, but are not limited to, COS cells, including COS 7 cells; 293 cells, including 293-6E cells; CHO cells, including CHO-S and DG44 cells; PER.C6™ cells (Crucell); and NSO cells. In some embodiments, a particular eukaryotic host cell is selected based on its ability to make desired post-translational modifications to the heavy chains and/or light chains.

[1131] A number of suitable host cell lines capable of secreting intact heterologous proteins have been developed in the art, and include, but are not limited to CHO cell lines, various COS cell lines, HeLa cells, L cells and multiple myeloma cell lines.

[1132] An expression vector carrying a chimeric, humanized, or composite human antibody construct, antibody or antigen-binding fragment thereof as described herein can be introduced into an appropriate host cell by any of a variety of suitable means, depending on the type of cellular host including, but not limited to transformation, transfection, lipofection, conjugation, electroporation, direct microinjection, and microprojectile bombardment, as known to one of ordinary skill in the art. Expression vectors for these cells can include expression control sequences, such as an origin of replication sites, a promoter, an enhancer and necessary processing information sites, such as ribosome binding sites, RNA splice sites, polyadenylation sites, and transcriptional terminator sequences.

[1133] In various embodiments, yeast can also be utilized as hosts for the production of the antibody molecules or peptides described herein. In various other embodiments, bacterial strains can also be utilized as hosts for the production of the antibody molecules or peptides described herein. Examples of bacterial strains include, but are not limited to E. coli, Bacillus species, enterobacteria, and various Pseudomonas species.

[1134] In some embodiments, one or more antibodies or antigen-binding fragments thereof as described herein can be produced in vivo in an animal that has been engineered (transgenic) or transfected with one or more nucleic acid molecules encoding the polypeptides, according to any suitable method. For production of transgenic animals, transgenes can be microinjected into fertilized oocytes, or can be incorporated into the genome of embryonic stem cells, and the nuclei of such cells transferred into enucleated oocytes. Once expressed, antibodies can be purified according to standard procedures of the art, including HPLC purification, column chromatography, gel electrophoresis and the like (see generally, Scopes, Protein Purification (Springer-Verlag, NY, 1982)).

[1135] Once expressed in the host, the whole antibodies, antibody-fragments (e.g., individual light and heavy chains), or other immunoglobulin forms of the present disclosure can be recovered and purified by known techniques, e.g., immunoabsorption or immunoaffinity chromatography, chromatographic methods such as HPLC (high performance liquid chromatography), ammonium sulfate precipitation, gel electrophoresis, or any combination of these. See generally, Scopes, PROTEIN PURIF. (Springer-Verlag, N Y, 1982). Substantially pure immunoglobulins of at least about 90% to 95% homogeneity are advantageous, as are those with 98% to 99% or more homogeneity, particularly for pharmaceutical uses. Once purified, partially or to homogeneity as desired, a humanized or composite human antibody can then be used therapeutically or in developing and performing assay procedures, immunofluorescent stainings, etc. See generally, Vols. I & II Immunol. Meth. (Lefkovits & Pernis, eds., Acad. Press, N Y, 1979 and 1981).

[1136] Various embodiments provide for a genetic construct comprising a nucleic acid encoding an anti-TL1A antibody or fragment provided herein. Genetic constructs of the antibody can be in the form of expression cassettes, which can be suitable for expression of the encoded anti-TL1A antibody or fragment. The genetic construct may be introduced into a host cell with or without being incorporated in a vector. For example, the genetic construct can be incorporated within a liposome or a virus particle. Alternatively, a purified nucleic acid molecule can be inserted directly into a host cell by methods known in the art. The genetic construct can be introduced directly into cells of a host subject by transfection, infection, electroporation, cell fusion, protoplast fusion, microinjection or ballistic bombardment.

[1137] Various embodiments provide a recombinant vector comprising the genetic construct of an antibody provided herein. The recombinant vector can be a plasmid, cosmid or phage. The recombinant vectors can include other functional elements; for example, a suitable promoter to initiate gene expression.

[1138] Various embodiments provide a host cell comprising a genetic construct and/or recombinant vector described herein.

[1139] Various host systems are also advantageously employed to express recombinant protein. Examples of suitable mammalian host cell lines include the COS-7 lines of monkey kidney cells, and other cell lines capable of expressing an appropriate vector including, for example, L cells, C127, 3T3, Chinese hamster ovary (CHO), HeLa and BHK cell lines. Mammalian expression vectors can comprise non-transcribed elements such as an origin of replication, a suitable promoter and enhancer linked to the gene to be expressed, and other 5′ or 3′ flanking non-transcribed sequences, and 5′ or 3′ non-translated sequences, such as necessary ribosome binding sites, a polyadenylation site, splice donor and acceptor sites, and transcriptional termination sequences.

[1140] The proteins produced by a transformed host can be purified according to any suitable method. Such standard methods include chromatography (e.g., ion exchange, affinity and sizing column chromatography), centrifugation, differential solubility, or by any other standard technique for protein purification. Affinity tags such as hexahistidine (SEQ ID NO: 1303), maltose binding domain, influenza coat sequence and glutathione-S-transferase can be attached to the protein to allow easy purification by passage over an appropriate affinity column. Isolated proteins can also be physically characterized using such techniques as proteolysis, nuclear magnetic resonance and x-ray crystallography. Recombinant protein produced in bacterial culture can be isolated.

[1141] One of skill will recognize that individual substitutions, deletions or additions to a nucleic acid, peptide, polypeptide, or protein sequence which alters a single amino acid or a small percentage of amino acids in the encoded sequence is a “conservatively modified variant” where the alteration results in the substitution of an amino acid with a chemically similar amino acid and retain the ability to specifically bind the target antigen. Such conservatively modified variants are in addition to and do not exclude polymorphic variants, interspecies homologs, and alleles consistent with the disclosure.

[1142] A given amino acid can be replaced by a residue having similar physiochemical characteristics, e.g., substituting one aliphatic residue for another (such as He, Val, Leu, or Ala for one another), or substitution of one polar residue for another (such as between Lys and Arg; Glu and Asp; or Gln and Asn). Other such conservative substitutions, e.g., substitutions of entire regions having similar hydrophobicity characteristics, are well known. Polypeptides comprising conservative amino acid substitutions can be tested in any one of the assays described herein to confirm that a desired activity, e.g. antigen-binding activity and specificity of a native or reference polypeptide is retained.

[1143] Particular conservative substitutions include, for example; Ala into Gly or into Ser; Arg into Lys; Asn into Gin or into H is; Asp into Glu; Cys into Ser; Gin into Asn; Glu into Asp; Gly into Ala or into Pro; His into Asn or into Gin; lie into Leu or into Val; Leu into lie or into Val; Lys into Arg, into Gin or into Glu; Met into Leu, into Tyr or into lie; Phe into Met, into Leu or into Tyr; Ser into Thr; Thr into Ser; Trp into Tyr; Tyr into Trp; and/or Phe into Val, into lie or into Leu.

[1144] In some embodiments, the antibody and/or antigen-binding fragment thereof described herein can be a variant of a sequence described herein, e.g., a conservative substitution variant of an antibody polypeptide. In some embodiments, the variant is a conservatively modified variant. A variant may refer to a polypeptide substantially homologous to a native or reference polypeptide, but which has an amino acid sequence different from that of the native or reference polypeptide because of one or a plurality of deletions, insertions or substitutions. Variant polypeptide-encoding DNA sequences encompass sequences that comprise one or more additions, deletions, or substitutions of nucleotides when compared to a native or reference DNA sequence, but that encode a variant protein or fragment thereof that retains activity, e.g., antigen-specific binding activity for the relevant target polypeptide.

[1145] Alterations of the native amino acid sequence can be accomplished by any of a number of techniques known to one of skill in the art. Mutations can be introduced at particular loci or by oligonucleotide-directed site-specific mutagenesis procedures. Techniques for making such alterations are very well established and include, for example, those disclosed by Walder et al. (Gene 42: 133, 1986); Bauer et al. (Gene 37:73, 1985); Craik (BioTechniques, January 1985, 12-19); Smith et al. (Genetic Engineering: Principles and Methods, Plenum Press, 1981).

[1146] Nucleic acid molecules encoding amino acid sequence variants of antibodies are prepared by a variety of methods known in the art. These methods include, but are not limited to, preparation by oligonucleotide-mediated (or site-directed) mutagenesis, PCR mutagenesis, and cassette mutagenesis of an earlier prepared variant or a non-variant version of the antibody. A nucleic acid sequence encoding at least one antibody, portion or polypeptide as described herein can be recombined with vector DNA in accordance with conventional techniques, including but not limited to, blunt-ended or staggered-ended termini for ligation and restriction enzyme digestion. Techniques for such manipulations are disclosed, e.g., by Maniatis et al., Molecular Cloning, Lab. Manual (Cold Spring Harbor Lab. Press, N Y, 1982 and 1989), and can be used to construct nucleic acid sequences which encode a monoclonal antibody molecule or antigen-binding region.

[1147] In some embodiments, a nucleic acid encoding an antibody or antigen-binding fragment thereof as described herein is comprised by a vector. In some of the aspects described herein, a nucleic acid sequence encoding an antibody or antigen-binding fragment thereof as described herein, or any module thereof, is operably linked to a vector. The term “vector,” as used herein, refers to a nucleic acid construct designed for delivery to a host cell or for transfer between different host cells. As used herein, a vector can be viral or non-viral. The term “vector” encompasses any genetic element that is capable of replication when associated with the proper control elements and that can transfer gene sequences to cells. A vector can include, but is not limited to, a cloning vector, an expression vector, a plasmid, phage, transposon, cosmid, chromosome, virus, virion, etc.

[1148] As used herein, the term “expression vector” refers to a vector that directs expression of an RNA or polypeptide from sequences linked to transcriptional regulatory sequences on the vector. The term “expression” refers to the cellular processes involved in producing RNA and proteins and as appropriate, secreting proteins, including where applicable, but not limited to, for example, transcription, transcript processing, translation and protein folding, modification and processing. “Expression products” include RNA transcribed from a gene, and polypeptides obtained by translation of mRNA transcribed from a gene. The term “gene” means the nucleic acid sequence which is transcribed (DNA) to RNA in vitro or in vivo when operably linked to appropriate regulatory sequences. The gene may or may not include regions preceding and following the coding region, e.g., 5′ untranslated (5′UTR) or “leader” sequences and 3′ UTR or “trailer” sequences, as well as intervening sequences (introns) between individual coding segments (exons).

[1149] As used herein, the term “viral vector” refers to a nucleic acid vector construct that includes at least one element of viral origin and has the capacity to be packaged into a viral vector particle. The viral vector can contain the nucleic acid encoding an antibody or antigen-binding portion thereof as described herein in place of non-essential viral genes. The vector and/or particle may be utilized for the purpose of transferring any nucleic acids into cells either in vitro or in vivo. Numerous forms of viral vectors are known in the art.

[1150] By “recombinant vector,” it is meant that the vector includes a heterologous nucleic acid sequence, or “transgene” that is capable of expression in vivo.

### Pharmaceutical Compositions, Administration and Dosage

[1151] The anti-TL1A antibodies provided are useful in a variety of applications including, but not limited to, therapeutic treatment methods, such as the treatment of IBD. The methods of use may be in vitro, ex vivo, or in vivo methods. In certain embodiments, the anti-TL1A antibody is an antagonist for TL1A receptors.

[1152] In certain embodiments, the disease treated with anti-TL1A antibody or TL1A receptor antagonist is IBD, CD, UC and/or MR-UC.

[1153] In various embodiments, the pharmaceutical compositions are formulated for delivery via any route of administration. “Route of administration” may refer to any administration pathway known in the art, including but not limited to aerosol, nasal, oral, transmucosal, transdermal or parenteral.

[1154] The pharmaceutical compositions can also contain any pharmaceutically acceptable carrier. “Pharmaceutically acceptable carrier” refers to a pharmaceutically acceptable material, composition, or vehicle that is involved in carrying or transporting a compound of interest from one tissue, organ, or portion of the body to another tissue, organ, or portion of the body. For example, the carrier may be a liquid or solid filler, diluent, excipient, solvent, or encapsulating material, or a combination thereof. Each component of the carrier must be “pharmaceutically acceptable” in that it must be compatible with the other ingredients of the formulation. It must also be suitable for use in contact with any tissues or organs with which it may come in contact, meaning that it must not carry a risk of toxicity, irritation, allergic response, immunogenicity, or any other complication that excessively outweighs its therapeutic benefits.

[1155] In various embodiments, provided are pharmaceutical compositions including a pharmaceutically acceptable excipient along with a therapeutically effective amount of an anti-TL1A antibody. “Pharmaceutically acceptable excipient” means an excipient that is useful in preparing a pharmaceutical composition that is generally safe, non-toxic, and desirable, and includes excipients that are acceptable for veterinary use as well as for human pharmaceutical use. The active ingredient can be mixed with excipients which are pharmaceutically acceptable and compatible with the active ingredient and in amounts suitable for use in therapeutic methods described herein. Such excipients may be solid, liquid, semisolid, or, in the case of an aerosol composition, gaseous. Suitable excipients are, for example, starch, glucose, lactose, sucrose, gelatin, malt, rice, flour, chalk, silica gel, sodium stearate, glycerol monostearate, talc, sodium chloride, dried skim milk, water, saline, dextrose, propylene glycol, glycerol, ethanol, mannitol, polysorbate or the like and combinations thereof. In addition, if desired, the composition can contain minor amounts of auxiliary substances such as wetting or emulsifying agents, pH buffering agents and the like which enhance or maintain the effectiveness of the active ingredient. Therapeutic compositions as described herein can include pharmaceutically acceptable salts. Pharmaceutically acceptable salts include the acid addition salts formed with inorganic acids such as, for example, hydrochloric or phosphoric acids, organic acids, for example, acetic, tartaric or mandelic, salts formed from inorganic bases such as, for example, sodium, potassium, ammonium, calcium or ferric hydroxides, and salts formed from organic bases such as isopropylamine, trimethylamine, 2-ethylamino ethanol, histidine, procaine and the like. Liquid compositions can contain liquid phases in addition to and in the exclusion of water, for example, glycerin, vegetable oils such as cottonseed oil, and water-oil emulsions. Physiologically tolerable carriers are well known in the art. The amount of an active agent (i.e. antibody or fragment thereof) used that will be effective in the treatment of a particular disorder or condition will depend on the nature of the disorder or condition and can be determined by one of skill in the art with standard clinical techniques.

[1156] The pharmaceutical compositions may be delivered in a therapeutically effective amount. The precise therapeutically effective amount is that amount of the composition that will yield the most effective results in terms of efficacy of treatment in a given subject. This amount will vary depending upon a variety of factors, including but not limited to the characteristics of therapeutic compound (including activity, pharmacokinetics, pharmacodynamics, and bioavailability), the physiological condition of the subject (including age, sex, disease type and stage, general physical condition, responsiveness to a given dosage, and type of medication), the nature of the pharmaceutically acceptable carrier or carriers in the formulation, and the route of administration. One skilled in the clinical and pharmacological arts will be able to determine a therapeutically effective amount through routine experimentation, for instance, by monitoring a subject's response to administration of a compound and adjusting the dosage accordingly. For additional guidance, see Remington: The Science and Practice of Pharmacy (Gennaro ed. 20th edition, Williams & Wilkins PA, USA) (2000).

[1157] For the treatment of the disease, the appropriate dosage of an antibody depends on the type of disease to be treated, the severity and course of the disease, the responsiveness of the disease, whether the antibody is administered for therapeutic or preventative purposes, previous therapy, and patient's clinical history. The dosage can also be adjusted by the individual physician in the event of any complication and at the discretion of the treating physician. The administering physician can determine optimum dosages, dosing methodologies and repetition rates. The TL1A antibody can be administered one time or over a series of treatments lasting from several days to several months, or until a cure is effected or a diminution of the disease state is achieved (e.g., treatment or amelioration of IBD). The duration of treatment depends upon the subject's clinical progress and responsiveness to therapy. In certain embodiments, dosage is from 0.01 μg to 100 mg per kg of body weight, and can be given once or more daily, weekly, monthly or yearly.

[1158] Antibody therapeutics suitable for injection and/or administration are important to realizing the full therapeutic potential of mAbs (monoclonal antibodies, e.g. an anti-TL1A monoclonal antibody). However, administration is generally restricted by volume. This, in turn, elucidates the importance developing of high concentration mAb formulations of greater than, for example in some cases, 100 mg/ml. Problems associated with mAb development include high solution viscosity and opalescence, which are commonly encountered during the development of high-concentration (e.g. greater than 100 mg/ml). Both viscosity and opalescence impact mAb developability broadly, affecting manufacturability, stability, and delivery. High solution viscosities (e.g. greater than 30 mPa-s) cause limiting back-pressures in ultrafiltration/diafiltration during the mAb concentration unit operation. Similarly, viscous mAb solutions also result in forbidding or incompatible injection forces when administering via injection, including via patient friendly autoinjectors. In effect, solution viscosity can be a determining factor for the maximum mAb dose possible via injection. Solution opalescence in therapeutic mAbs can be equally problematic as opalescence can indicate predisposition for liquid-liquid phase separation, precipitation, or aggregation

[1159] The anti-TL1A antibodies provided herein demonstrate advantageous viscosity and aggregation properties at high antibody concentrations (e.g. greater than 100 mg/mL or greater than 150 mg/mL). Notably, anti-TL1A antibodies provided herein are characterized by low viscosity (e.g. less than 10 mPa-s) and low aggregation (e.g. less than 5% high molecular weight species) at high concentrations (FIGS. 7A-7C).

[1160] For example, for an antibody or antigen binding fragment wherein HCDR1 comprises SEQ ID NO: 1, HCDR2 comprises SEQ ID NO: 2, HCDR3 comprises SEQ ID NO: 6, LCDR1 comprises SEQ ID NO: 10, LCDR2 comprises SEQ ID NO: 11, and LCDR3 comprises SEQ ID NO: 12 or an antibody or antigen binding fragment wherein the heavy chain variable region comprises SEQ ID NO: 104 and the light chain variable region comprises SEQ ID NO: 201, in some embodiments, the anti-T1LA antibody is characterized by a viscosity less than about 30, 20, 15, or 10 mPa-s at a concentration greater than about 100 mg/mL, e.g., up to about 170 mg/mL. In some embodiments, the anti-T1LA antibody is characterized by a viscosity less than about 30, 20, 15, or 10 mPa-s at a concentration greater than at least about 100 mg/mL. In some embodiments, the anti-T1LA antibody is characterized by a viscosity less than about 30, 20, 15, or 10 mPa-s at a concentration up to about 170 mg/mL. In some embodiments, the anti-T1LA antibody is characterized by a viscosity less than about 30, 20, 15, or 10 mPa-s at a concentration from about 100 mg/mL to about 125 mg/mL, about 100 mg/mL to about 150 mg/mL, about 100 mg/mL to about 160 mg/mL, about 100 mg/mL to about 170 mg/mL, about 125 mg/mL to about 150 mg/mL, about 125 mg/mL to about 160 mg/mL, about 125 mg/mL to about 170 mg/mL, about 150 mg/mL to about 160 mg/mL, about 150 mg/mL to about 170 mg/mL, or about 160 mg/mL to about 170 mg/mL. In some embodiments, the anti-T1LA antibodies is characterized by a viscosity less than about 30, 20, 15, or 10 mPa-s at a concentration about or greater than about 100 mg/mL, about 125 mg/mL, about 150 mg/mL, about 160 mg/mL, or about 170 mg/mL. In some embodiments, less than about 10 mPa-s includes from about 4 to about 10 mPa-s, from about 4 to about 9 mPa-s, from about 4 to about 8 mPa-s, from about 4 to about 7 mPa-s, from about 4 to about 6 mPa-s, from about 4 to about 5 mPa-s, from about 5 to about 10 mPa-s, from about 5 to about 9 mPa-s, from about 5 to about 8 mPa-s, from about 5 to about 7 mPa-s, from about 5 to about 6 mPa-s, from about 6 to about 10 mPa-s, from about 6 to about 9 mPa-s, from about 6 to about 8 mPa-s, or from about 6 to about 7 mPa-s. In some embodiments, greater than about 100, 125, 150, or 160 mg/ml is up to about 170 mg/ml.

[1161] Additionally, for example, for an antibody or antigen binding fragment wherein HCDR1 comprises SEQ ID NO: 1, HCDR2 comprises SEQ ID NO: 2, HCDR3 comprises SEQ ID NO: 6, LCDR1 comprises SEQ ID NO: 10, LCDR2 comprises SEQ ID NO: 11, and LCDR3 comprises SEQ ID NO: 12 or an antibody or antigen binding fragment wherein the heavy chain variable region comprises SEQ ID NO: 104 and the light chain variable region comprises SEQ ID NO: 201, in some embodiments, the anti-TL1A antibody is characterized by a turbidity less than 12 Nephelometric Turbidity Units (NTU) when at a concentration greater than about 100 mg/mL to about 170 mg/mL. In some embodiments, the anti-TL1A antibody is characterized by a turbidity less than 12 Nephelometric Turbidity Units (NTU) when at a concentration greater than at least about 100 mg/mL. In some embodiments, the anti-TL1A antibody is characterized by a turbidity less than 12 Nephelometric Turbidity Units (NTU) when at a concentration up to about 170 mg/mL. In some embodiments, the anti-TL1A antibody is characterized by a turbidity less than 12 Nephelometric Turbidity Units (NTU) when at a concentration from about 100 mg/mL to about 125 mg/mL, about 100 mg/mL to about 150 mg/mL, about 100 mg/mL to about 160 mg/mL, about 100 mg/mL to about 170 mg/mL, about 125 mg/mL to about 150 mg/mL, about 125 mg/mL to about 160 mg/mL, about 125 mg/mL to about 170 mg/mL, about 150 mg/mL to about 160 mg/mL, about 150 mg/mL to about 170 mg/mL, or about 160 mg/mL to about 170 mg/mL. In some embodiments, the anti-TL1A antibody is characterized by a turbidity less than 12 Nephelometric Turbidity Units (NTU) when at a concentration at or greater than about 100 mg/mL, about 125 mg/mL, about 150 mg/mL, about 160 mg/mL, or about 170 mg/mL.

[1162] By way of further example, for an antibody or antigen binding fragment wherein HCDR1 comprises SEQ ID NO: 1, HCDR2 comprises SEQ ID NO: 2, HCDR3 comprises SEQ ID NO: 6, LCDR1 comprises SEQ ID NO: 10, LCDR2 comprises SEQ ID NO: 11, and LCDR3 comprises SEQ ID NO: 12 or an antibody or antigen binding fragment wherein the heavy chain variable region comprises SEQ ID NO: 104 and the light chain variable region comprises SEQ ID NO: 201, in some embodiments, the anti-T1LA antibody at a concentration from about 150 mg/mL to about or greater than about 170 mg/mL is characterized by a viscosity less than about 10 mPa-s to about 30 mPa-s. In some embodiments, the anti-T1LA antibody at a concentration from about 150 mg/mL to about or greater than about 170 mg/mL is characterized by a viscosity less than about 30 mPa-s. In some embodiments, the anti-T1LA antibody at a concentration from about 150 mg/mL to about or greater than about 170 mg/mL is characterized by a viscosity less than about 5 mPa-s to about 10 mPa-s, about 5 mPa-s to about 15 mPa-s, about 5 mPa-s to about 20 mPa-s, about 5 mPa-s to about 30 mPa-s, about 10 mPa-s to about 15 mPa-s, about 10 mPa-s to about 20 mPa-s, about 10 mPa-s to about 30 mPa-s, about 15 mPa-s to about 20 mPa-s, about 15 mPa-s to about 30 mPa-s, about 20 mPa-s to about 30 mPa-s, about 5 mPa-s to about 9 mPa-s, about 4 to about 10 mPa-s, about 4 to about 9 mPa-s, about 4 to about 8 mPa-s, about 4 to about 7 mPa-s, about 4 to about 6 mPa-s, about 4 to about 5 mPa-s, about 5 to about 10 mPa-s, about 5 to about 9 mPa-s, about 5 to about 8 mPa-s, about 5 to about 7 mPa-s, about 5 to about 6 mPa-s, about 6 to about 10 mPa-s, about 6 to about 9 mPa-s, about 6 to about 8 mPa-s, or about 6 to about 7 mPa-s. In some embodiments, the anti-T1LA antibody at a concentration of about 150 mg/mL to about or greater than about 170 mg/mL is characterized by a viscosity less than about 5 mPa-s, about 10 mPa-s, about 15 mPa-s, about 20 mPa-s, or about 30 mPa-s. In some embodiments, less than about 5, 10, 15, 20, or 30 mPa-s is at least about 1 mPa-s.

[1163] Additionally, for example, for an antibody or antigen binding fragment wherein HCDR1 comprises SEQ ID NO: 1, HCDR2 comprises SEQ ID NO: 2, HCDR3 comprises SEQ ID NO: 6, LCDR1 comprises SEQ ID NO: 10, LCDR2 comprises SEQ ID NO: 11, and LCDR3 comprises SEQ ID NO: 12 or an antibody or antigen binding fragment wherein the heavy chain variable region comprises SEQ ID NO: 104 and the light chain variable region comprises SEQ ID NO: 201, in some embodiments, the anti-TL1A antibody having a concentration greater than 150 mg/mL is characterized by a turbidity less than about 5 Nephelometric Turbidity Units (NTU) to about 15 Nephelometric Turbidity Units (NTU). In some embodiments, the anti-TL1A antibody having a concentration greater than 150 mg/mL is characterized by a turbidity less than at least about 5 Nephelometric Turbidity Units (NTU). In some embodiments, the anti-TL1A antibody having a concentration greater than 150 mg/mL is characterized by a turbidity less than at most about 15 Nephelometric Turbidity Units (NTU). In some embodiments, the anti-TL1A antibody having a concentration greater than 150 mg/mL is characterized by a turbidity less than about 5 Nephelometric Turbidity Units (NTU) to about 7.5 Nephelometric Turbidity Units (NTU), about 5 Nephelometric Turbidity Units (NTU) to about 10 Nephelometric Turbidity Units (NTU), about 5 Nephelometric Turbidity Units (NTU) to about 12.5 Nephelometric Turbidity Units (NTU), about 5 Nephelometric Turbidity Units (NTU) to about 15 Nephelometric Turbidity Units (NTU), about 7.5 Nephelometric Turbidity Units (NTU) to about 10 Nephelometric Turbidity Units (NTU), about 7.5 Nephelometric Turbidity Units (NTU) to about 12.5 Nephelometric Turbidity Units (NTU), about 7.5 Nephelometric Turbidity Units (NTU) to about 15 Nephelometric Turbidity Units (NTU), about 10 Nephelometric Turbidity Units (NTU) to about 12.5 Nephelometric Turbidity Units (NTU), about 10 Nephelometric Turbidity Units (NTU) to about 15 Nephelometric Turbidity Units (NTU), or about 12.5 Nephelometric Turbidity Units (NTU) to about 15 Nephelometric Turbidity Units (NTU). In some embodiments, the anti-TL1A antibody having a concentration greater than 150 mg/mL is characterized by a turbidity less than about 5 Nephelometric Turbidity Units (NTU), about 7.5 Nephelometric Turbidity Units (NTU), about 10 Nephelometric Turbidity Units (NTU), about 12.5 Nephelometric Turbidity Units (NTU), or about 15 Nephelometric Turbidity Units (NTU).

[1164] The anti-TL1A antibodies described herein also demonstrate advantageous aggregation properties. For an antibody or antigen binding fragment wherein HCDR1 comprises SEQ ID NO: 1, HCDR2 comprises SEQ ID NO: 2, HCDR3 comprises SEQ ID NO: 6, LCDR1 comprises SEQ ID NO: 10, LCDR2 comprises SEQ ID NO: 11, and LCDR3 comprises SEQ ID NO: 12 or an antibody or antigen binding fragment wherein the heavy chain variable region comprises SEQ ID NO: 104 and the light chain variable region comprises SEQ ID NO: 201, in some embodiments, the anti-TL1A antibody composition is characterized by percent high molecular weight species (e.g. a species having a molecular weight greater than the molecular weight of the monomer)) less than 10% when at a concentration greater than about 100 mg/mL to about greater than 170 mg/mL. In some embodiments, the anti-TL1A antibody composition is characterized by percent high molecular weight species less than 10% when at a concentration greater than at least about 100 mg/mL. In some embodiments, the anti-TL1A antibody composition is characterized by percent high molecular weight species less than 10% when at a concentration up to about 170 mg/mL. In some embodiments, the anti-TL1A antibody composition is characterized by percent high molecular weight species less than 10% when at a concentration from about 100 mg/mL to about 125 mg/mL, about 100 mg/mL to about 150 mg/mL, about 100 mg/mL to about 160 mg/mL, about 100 mg/mL to about 170 mg/mL, about 125 mg/mL to about 150 mg/mL, about 125 mg/mL to about 160 mg/mL, about 125 mg/mL to about 170 mg/mL, about 150 mg/mL to about 160 mg/mL, about 150 mg/mL to about 170 mg/mL, or about 160 mg/mL to about 170 mg/mL. In some embodiments, the anti-TL1A antibody composition is characterized by percent high molecular weight species less than 10% when at a concentration about or greater than about 100 mg/mL, about 125 mg/mL, about 150 mg/mL, about 160 mg/mL, or about 170 mg/mL. In some embodiments, the anti-TL1A antibody composition having an antibody concentration greater than 150 mg/mL is characterized by a high molecular weight species less than about 5% to about 15%. In some embodiments, the anti-TL1A antibody composition having an antibody concentration greater than 150 mg/mL is characterized by a high molecular weight species less than at most about 15%. In some embodiments, the anti-TL1A antibody composition having an antibody concentration greater than 150 mg/mL is characterized by a high molecular weight species less than about 5% to about 7.5%, about 5% to about 10%, about 5% to about 15%, about 5% to about 17.5%, about 5% to about 20%, about 5% to about 25%, about 7.5% to about 10%, about 7.5% to about 15%, about 7.5% to about 17.5%, about 7.5% to about 20%, about 7.5% to about 25%, about 10% to about 15%, about 10% to about 17.5%, about 10% to about 20%, about 10% to about 25%, about 15% to about 17.5%, about 15% to about 20%, about 15% to about 25%, about 17.5% to about 20%, about 17.5% to about 25%, or about 20% to about 25%. In some embodiments, the anti-TL1A antibody composition having an antibody concentration greater than 150 mg/mL is characterized by a high molecular weight species less than about 5%, about 7.5%, about 10%, about 15%, about 17.5%, about 20%, or about 25%.

[1165] By way of further example, for an antibody or antigen binding fragment comprising a heavy chain variable framework region comprising a human IGHV1-46*02 framework or a modified human IGHV1-46*02 framework, and a light chain variable framework region comprising a human IGKV3-20 framework or a modified human IGKV3-20 framework; wherein the heavy chain variable framework region and the light chain variable framework region collectively comprise less than 9 amino acid modifications from the human IGHV1-46*02 framework and the human IGKV3-20 framework, in some embodiments, the anti-T1LA antibodies is characterized by a viscosity less than 10 mPa-s at a concentration greater than about 100 mg/mL to about greater than 170 mg/mL. In some embodiments, the anti-T1LA antibodies is characterized by a viscosity less than 10 mPa-s at a concentration greater than at least about 100 mg/mL. In some embodiments, the anti-T1LA antibodies is characterized by a viscosity less than 10 mPa-s at a concentration greater than at most about 170 mg/mL. In some embodiments, the anti-T1LA antibodies is characterized by a viscosity less than 10 mPa-s at a concentration greater than about 100 mg/mL to about 125 mg/mL, about 100 mg/mL to about 150 mg/mL, about 100 mg/mL to about 160 mg/mL, about 100 mg/mL to about 170 mg/mL, about 125 mg/mL to about 150 mg/mL, about 125 mg/mL to about 160 mg/mL, about 125 mg/mL to about 170 mg/mL, about 150 mg/mL to about 160 mg/mL, about 150 mg/mL to about 170 mg/mL, or about 160 mg/mL to about 170 mg/mL. In some embodiments, the anti-T1LA antibodies is characterized by a viscosity less than 10 mPa-s at a concentration greater than about 100 mg/mL, about 125 mg/mL, about 150 mg/mL, about 160 mg/mL, or about 170 mg/mL.

[1166] Additionally, for example, for an antibody or antigen binding fragment comprising a heavy chain variable framework region comprising a human IGHV1-46*02 framework or a modified human IGHV1-46*02 framework, and a light chain variable framework region comprising a human IGKV3-20 framework or a modified human IGKV3-20 framework; wherein the heavy chain variable framework region and the light chain variable framework region collectively comprise less than 9 amino acid modifications from the human IGHV1-46*02 framework and the human IGKV3-20 framework, in some embodiments, the anti-TL1A antibody is characterized by a turbidity less than 12 Nephelometric Turbidity Units (NTU) when at a concentration greater than about 100 mg/mL to about greater than 170 mg/mL. In some embodiments, the anti-TL1A antibody is characterized by a turbidity less than 12 Nephelometric Turbidity Units (NTU) when at a concentration greater than at least about 100 mg/mL. In some embodiments, the anti-TL1A antibody is characterized by a turbidity less than 12 Nephelometric Turbidity Units (NTU) when at a concentration greater than at most about 170 mg/mL. In some embodiments, the anti-TL1A antibody is characterized by a turbidity less than 12 Nephelometric Turbidity Units (NTU) when at a concentration greater than about 100 mg/mL to about 125 mg/mL, about 100 mg/mL to about 150 mg/mL, about 100 mg/mL to about 160 mg/mL, about 100 mg/mL to about 170 mg/mL, about 125 mg/mL to about 150 mg/mL, ab out 125 mg/mL to about 160 mg/mL, about 125 mg/mL to about 170 mg/mL, about 150 mg/mL to about 160 mg/mL, about 150 mg/mL to about 170 mg/mL, or about 160 mg/mL to about 170 mg/mL. In some embodiments, the anti-TL1A antibody is characterized by a turbidity less than 12 Nephelometric Turbidity Units (NTU) when at a concentration greater than about 100 mg/mL, about 125 mg/mL, about 150 mg/mL, about 160 mg/mL, or about 170 mg/mL.

[1167] Additionally, for an antibody or antigen binding fragment comprising a heavy chain variable framework region comprising a human IGHV1-46*02 framework or a modified human IGHV1-46*02 framework, and a light chain variable framework region comprising a human IGKV3-20 framework or a modified human IGKV3-20 framework; wherein the heavy chain variable framework region and the light chain variable framework region collectively comprise less than 9 amino acid modifications from the human IGHV1-46*02 framework and the human IGKV3-20 framework, in some embodiments, the anti-T1LA antibody at a concentration greater than 150 mg/mL to greater than about 170 mg/mL is characterized by a viscosity less than about 10 mPa-s to about 30 mPa-s. In some embodiments, the anti-T1LA antibody at a concentration greater than 150 mg/mL to greater than about 170 mg/mL is characterized by a viscosity less than at most about 30 mPa-s. In some embodiments, the anti-T1LA antibody at a concentration greater than 150 mg/mL to greater than about 170 mg/mL is characterized by a viscosity less than about 5 mPa-s to about 10 mPa-s, about 5 mPa-s to about 15 mPa-s, about 5 mPa-s to about 20 mPa-s, about 5 mPa-s to about 30 mPa-s, about 10 mPa-s to about 15 mPa-s, about 10 mPa-s to about 20 mPa-s, about 10 mPa-s to about 30 mPa-s, about 15 mPa-s to about 20 mPa-s, about 15 mPa-s to about 30 mPa-s, or about 20 mPa-s to about 30 mPa-s. In some embodiments, the anti-T1LA antibody at a concentration greater than 150 mg/mL to greater than about 170 mg/mL is characterized by a viscosity less than about 5 mPa-s, about 10 mPa-s, about 15 mPa-s, about 20 mPa-s, or about 30 mPa-s.

[1168] Additionally, for example, for an antibody or antigen binding fragment comprising a heavy chain variable framework region comprising a human IGHV1-46*02 framework or a modified human IGHV1-46*02 framework, and a light chain variable framework region comprising a human IGKV3-20 framework or a modified human IGKV3-20 framework; wherein the heavy chain variable framework region and the light chain variable framework region collectively comprise less than 9 amino acid modifications from the human IGHV1-46*02 framework and the human IGKV3-20 framework, in some embodiments, the anti-TL1A antibody having a concentration greater than 150 mg/mL is characterized by a turbidity less than about 5 Nephelometric Turbidity Units (NTU) to about 15 Nephelometric Turbidity Units (NTU). In some embodiments, the anti-TL1A antibody having a concentration greater than 150 mg/mL is characterized by a turbidity less than at least about 5 Nephelometric Turbidity Units (NTU). In some embodiments, the anti-TL1A antibody having a concentration greater than 150 mg/mL is characterized by a turbidity less than at most about 15 Nephelometric Turbidity Units (NTU). In some embodiments, the anti-TL1A antibody having a concentration greater than 150 mg/mL is characterized by a turbidity less than about 5 Nephelometric Turbidity Units (NTU) to about 7.5 Nephelometric Turbidity Units (NTU), about 5 Nephelometric Turbidity Units (NTU) to about 10 Nephelometric Turbidity Units (NTU), about 5 Nephelometric Turbidity Units (NTU) to about 12.5 Nephelometric Turbidity Units (NTU), about 5 Nephelometric Turbidity Units (NTU) to about 15 Nephelometric Turbidity Units (NTU), about 7.5 Nephelometric Turbidity Units (NTU) to about 10 Nephelometric Turbidity Units (NTU), about 7.5 Nephelometric Turbidity Units (NTU) to about 12.5 Nephelometric Turbidity Units (NTU), about 7.5 Nephelometric Turbidity Units (NTU) to about 15 Nephelometric Turbidity Units (NTU), about 10 Nephelometric Turbidity Units (NTU) to about 12.5 Nephelometric Turbidity Units (NTU), about 10 Nephelometric Turbidity Units (NTU) to about 15 Nephelometric Turbidity Units (NTU), or about 12.5 Nephelometric Turbidity Units (NTU) to about 15 Nephelometric Turbidity Units (NTU). In some embodiments, the anti-TL1A antibody having a concentration greater than 150 mg/mL is characterized by a turbidity less than about 5 Nephelometric Turbidity Units (NTU), about 7.5 Nephelometric Turbidity Units (NTU), about 10 Nephelometric Turbidity Units (NTU), about 12.5 Nephelometric Turbidity Units (NTU), or about 15 Nephelometric Turbidity Units (NTU).

[1169] The anti-TL1A antibodies described herein also demonstrate advantageous aggregation properties. For an antibody or antigen binding fragment comprising a heavy chain variable framework region comprising a human IGHV1-46*02 framework or a modified human IGHV1-46*02 framework, and a light chain variable framework region comprising a human IGKV3-20 framework or a modified human IGKV3-20 framework; wherein the heavy chain variable framework region and the light chain variable framework region collectively comprise less than 9 amino acid modifications from the human IGHV1-46*02 framework and the human IGKV3-20 framework, in some embodiments, the anti-TL1A antibody composition is characterized by percent high molecular weight species (e.g. a species having a molecular weight greater than the molecular weight of the monomer)) less than 10% when at a concentration greater than about 100 mg/mL to about greater than 170 mg/mL. In some embodiments, the anti-TL1A antibody composition is characterized by percent high molecular weight species less than 10% when at a concentration greater than at least about 100 mg/mL. In some embodiments, the anti-TL1A antibody composition is characterized by percent high molecular weight species less than 10% when at a concentration greater than at most about 170 mg/mL. In some embodiments, the anti-TL1A antibody composition is characterized by percent high molecular weight species less than 10% when at a concentration greater than about 100 mg/mL to about 125 mg/mL, about 100 mg/mL to about 150 mg/mL, about 100 mg/mL to about 160 mg/mL, about 100 mg/mL to about 170 mg/mL, about 125 mg/mL to about 150 mg/mL, about 125 mg/mL to about 160 mg/mL, about 125 mg/mL to about 170 mg/mL, about 150 mg/mL to about 160 mg/mL, about 150 mg/mL to about 170 mg/mL, or about 160 mg/mL to about 170 mg/mL. In some embodiments, the anti-TL1A antibody composition is characterized by percent high molecular weight species less than 10% when at a concentration greater than about 100 mg/mL, about 125 mg/mL, about 150 mg/mL, about 160 mg/mL, or about 170 mg/mL. In some embodiments, the anti-TL1A antibody composition having an antibody concentration greater than 150 mg/mL is characterized by a high molecular weight species less than about 5% to about 15%. In some embodiments, the anti-TL1A antibody composition having an antibody concentration greater than 150 mg/mL is characterized by a high molecular weight species less than at most about 15%. In some embodiments, the anti-TL1A antibody composition having an antibody concentration greater than 150 mg/mL is characterized by a high molecular weight species less than about 5% to about 7.5%, about 5% to about 10%, about 5% to about 15%, about 5% to about 17.5%, about 5% to about 20%, about 5% to about 25%, about 7.5% to about 10%, about 7.5% to about 15%, about 7.5% to about 17.5%, about 7.5% to about 20%, about 7.5% to about 25%, about 10% to about 15%, about 10% to about 17.5%, about 10% to about 20%, about 10% to about 25%, about 15% to about 17.5%, about 15% to about 20%, about 15% to about 25%, about 17.5% to about 20%, about 17.5% to about 25%, or about 20% to about 25%. In some embodiments, the anti-TL1A antibody composition having an antibody concentration greater than 150 mg/mL is characterized by a high molecular weight species less than about 5%, about 7.5%, about 10%, about 15%, about 17.5%, about 20%, or about 25%.

### Dosages and Routes of Administration

[1170] In general, methods disclosed herein comprise administering a therapeutic agent by oral administration. However, in some instances, methods comprise administering a therapeutic agent by intraperitoneal injection. In some instances, methods comprise administering a therapeutic agent in the form of an anal suppository. In some instances, methods comprise administering a therapeutic agent by intravenous (“i.v.”) administration. It is conceivable that one may also administer therapeutic agents disclosed herein by other routes, such as subcutaneous injection, intramuscular injection, intradermal injection, transdermal injection percutaneous administration, intranasal administration, intralymphatic injection, rectal administration intragastric administration, or any other suitable renteral administration. In some embodiments, routes for local delivery closer to site of injury or inflammation are preferred over systemic routes. Routes, dosage, time points, and duration of administrating therapeutics may be adjusted. In some embodiments, administration of therapeutics is prior to, or after, onset of either, or both, acute and chronic symptoms of the disease or condition.

[1171] An effective dose and dosage of therapeutics to prevent or treat the disease or condition disclosed herein is defined by an observed beneficial response related to the disease or condition, or symptom of the disease or condition. Beneficial response comprises preventing, alleviating, arresting, or curing the disease or condition, or symptom of the disease or condition (e.g., reduced instances of diarrhea, rectal bleeding, weight loss, and size or number of intestinal lesions or strictures, reduced fibrosis or fibrogenesis, reduced fibrostenosis, reduced inflammation). In some embodiments, the beneficial response may be measured by detecting a measurable improvement in the presence, level, or activity, of biomarkers, transcriptomic risk profile, or intestinal microbiome in the subject. An “improvement,” as used herein refers to shift in the presence, level, or activity towards a presence, level, or activity, observed in normal individuals (e.g. individuals who do not suffer from the disease or condition). In instances wherein the therapeutic agent is not therapeutically effective or is not providing a sufficient alleviation of the disease or condition, or symptom of the disease or condition, then the dosage amount and/or route of administration may be changed, or an additional agent may be administered to the subject, along with the therapeutic agent. In some embodiments, as a patient is started on a regimen of a therapeutic agent, the patient is also weaned off (e.g., step-wise decrease in dose) a second treatment regimen.

[1172] Suitable dose and dosage administrated to a subject is determined by factors including, but no limited to, the particular therapeutic agent, disease condition and its severity, the identity (e.g., weight, sex, age) of the subject in need of treatment, and can be determined according to the particular circumstances surrounding the case, including, e.g., the specific agent being administered, the route of administration, the condition being treated, and the subject or host being treated. In general, however, doses employed for adult human treatment are typically in the range of 0.01 mg-5000 mg per day. In one aspect, doses employed for adult human treatment are from about 1 mg to about 1000 mg per day. In one embodiment, the desired dose is conveniently presented in a single dose or in divided doses administered simultaneously (or over a short period of time) or at appropriate intervals, for example as two, three, four or more sub-doses per day. Non-limiting examples of effective dosages of for oral delivery of a therapeutic agent include between about 0.1 mg/kg and about 100 mg/kg of body weight per day, and preferably between about 0.5 mg/kg and ab out 50 mg/kg of body weight per day. In other instances, the oral delivery dosage of effective amount is about 1 mg/kg and about 10 mg/kg of body weight per day of active material. Non-limiting examples of effective dosages for intravenous administration of the therapeutic agent include at a rate between about 0.01 to 100 pmol/kg body weight/min. In some embodiments, the daily dosage or the amount of active in the dosage form are lower or higher than the ranges indicated herein, based on a number of variables in regard to an individual treatment regime. In various embodiments, the daily and unit dosages are altered depending on a number of variables including, but not limited to, the activity of the therapeutic agent used, the disease or condition to be treated, the mode of administration, the requirements of the individual subject, the severity of the disease or condition being treated, and the judgment of the practitioner.

[1173] In some embodiments, the administration of the therapeutic agent is hourly, once every 2 hours, 3 hours, 4 hours, 5 hours, 6 hours, 7 hours, 8 hours, 9 hours, 10 hours, 11 hours, 12 hours, 13 hours, 14 hours, 15 hours, 16 hours, 17 hours, 18 hours, 19 hours, 20 hours, 21 hours 22 hours, 23 hours, 1 day, 2 days, 3 days, 4 days, 5 days, 6 days, 7 days, 8 days, 9 days, 10 days, 11 days, 12 days, 13 days, 14 days, 15 days, 1 month, 2 months, 3 months, 4 months, 5 months, 6 months, 7 months, 8 months, 9 months, 10 months, 11 months, 1 year, 2 years, 3 years, 4 years, or 5 years, or 10 years. The effective dosage ranges may be adjusted based on subject's response to the treatment. Some routes of administration will require higher concentrations of effective amount of therapeutics than other routes.

[1174] In certain embodiments wherein the patient's condition does not improve, upon the doctor's discretion the administration of therapeutic agent is administered chronically, that is, for an extended period of time, including throughout the duration of the patient's life in order to ameliorate or otherwise control or limit the symptoms of the patient's disease or condition. In certain embodiments wherein a patient's status does improve, the dose of therapeutic agent being administered may be temporarily reduced or temporarily suspended for a certain length of time (i.e., a “drug holiday”). In specific embodiments, the length of the drug holiday is between 2 days and 1 year, including by way of example only, 2 days, 3 days, 4 days, 5 days, 6 days, 7 days, 10 days, 12 days, 15 days, 20 days, 28 days, or more than 28 days. The dose reduction during a drug holiday is, by way of example only, by 10%-100%, including by way of example only 10%, 15%, 20%, 25%, 30%, 35%, 40%, 45%, 50%, 55%, 60%, 65%, 70%, 75%, 80%, 85%, 90%, 95%, and 100%. In certain embodiments, the dose of drug being administered may be temporarily reduced or temporarily suspended for a certain length of time (i.e., a “drug diversion”). In specific embodiments, the length of the drug diversion is between 2 days and 1 year, including by way of example only, 2 days, 3 days, 4 days, 5 days, 6 days, 7 days, 10 days, 12 days, 15 days, 20 days, 28 days, or more than 28 days. The dose reduction during a drug diversion is, by way of example only, by 10%-100%, including by way of example only 10%, 15%, 20%, 25%, 30%, 35%, 40%, 45%, 50%, 55%, 60%, 65%, 70%, 75%, 80%, 85%, 90%, 95%, and 100%. After a suitable length of time, the normal dosing schedule is optionally reinstated.

[1175] In some embodiments, once improvement of the patient's conditions has occurred, a maintenance dose is administered if necessary. Subsequently, in specific embodiments, the dosage or the frequency of administration, or both, is reduced, as a function of the symptoms, to a level at which the improved disease, disorder or condition is retained. In certain embodiments, however, the patient requires intermittent treatment on a long-term basis upon any recurrence of symptoms.

[1176] Toxicity and therapeutic efficacy of such therapeutic regimens are determined by standard pharmaceutical procedures in cell cultures or experimental animals, including, but not limited to, the determination of the LD50 and the ED50. The dose ratio between the toxic and therapeutic effects is the therapeutic index and it is expressed as the ratio between LD50 and ED50. In certain embodiments, the data obtained from cell culture assays and animal studies are used in formulating the therapeutically effective daily dosage range and/or the therapeutically effective unit dosage amount for use in mammals, including humans. In some embodiments, the daily dosage amount of the therapeutic agent described herein lies within a range of circulating concentrations that include the ED50 with minimal toxicity. In certain embodiments, the daily dosage range and/or the unit dosage amount varies within this range depending upon the dosage form employed and the route of administration utilized.

### NUMBERED EMBODIMENTS

[1177] In certain embodiments, described herein are methods for evaluating an effect of a treatment described herein. In some instances, the treatment comprises administration with an inhibitor of TL1A activity or expression and optionally, one or more additional therapeutic agents. In some instances, the treatment is monitored by evaluating the quantity of TL1A in the subject prior to and/or after administration of a therapeutic agent.
[1178] 1. A method of inhibiting or reducing TL1A activity or expression in a subject having or suspected of having at least one of an inflammatory, fibrostenotic, and fibrotic, disease or condition the method comprising:
   [1179] a) identifying the subject as being a carrier of a genotype comprising a polymorphism provided in Table 1 or Table 4, or a polymorphism in linkage disequilibrium (LD) therewith; and
   [1180] b) administering to the subject a therapeutically effective amount of an anti-TL1A antibody from Tables 16-17 or 20, thereby inhibiting or reducing TL1A activity or expression in the subject.
[1181] 2. The method of embodiment 1, provided that the inflammatory, fibrostenotic, and fibrotic, disease or condition comprises Crohn's disease, scleroderma, or pulmonary fibrosis (e.g., idiopathic pulmonary fibrosis).
[1182] 3. The method of embodiment 2, provided that the Crohn's disease comprises ileal, ileocolonic, or colonic Crohn's disease.
[1183] 4. The method of embodiment 1, provided that the inflammatory disease comprises ulcerative colitis (UC).
[1184] 5. The method of embodiment 4, provided that the UC is medically refractory UC.
[1185] 6. The method of any of embodiments 1-5, wherein identifying the subject as being a carrier of the genotype of step (a) comprises:
   [1186] a) contacting a sample comprising genetic material from the subject with a nucleic acid sequence capable of hybridizing to at least 10 contiguous nucleobases comprising a risk allele located at nucleoposition 501 within any one of SEQ ID NOS: 2001-2048, or 2057-2059; and
   [1187] b) detecting binding between the nucleic acid sequence and the at least 10 contiguous nucleobases comprising the risk allele.
[1188] 7. The method of embodiment 6, provided that the standard hybridization conditions comprise an annealing temperature between about 35° C. and about 65° C.
[1189] 8. The method of embodiment 6 or embodiment 7, provided that the standard hybridization conditions are performed with a TaqMan master mix solution.
[1190] 9. The method of any of embodiments 6-8, provided that the nucleic acid sequence is conjugated to a detectable molecule.
[1191] 10. The method of embodiment 9, provided that the detectable molecule comprises a fluorophore.
[1192] 11. The method of any of embodiments 6-10, provided that the nucleic acid sequence is conjugated to a quencher.
[1193] 12. The method of any of embodiments 6-11, provided that the sample comprising genetic material from the subject is amplified genetic material obtained from a nucleic acid amplification assay.
[1194] 13. The method of embodiment 12, provided that the nucleic acid amplification assay comprises amplification of DNA from the subject with a pair of primers capable of amplifying at least 15 contiguous nucleobases comprising the risk allele located at nucleoposition 501 within any one of SEQ ID NOS: 2001-2048, or 2057-2059, the pair of primers comprising a first primer and a second primer.
[1195] 14. The method of embodiment 12, provided that the first primer comprises a nucleic acid sequence complimentary to at least 15 contiguous nucleobases upstream of the risk allele located at nucleobase 501 within any one of SEQ ID NOS: 2001-2048, or 2057-2059, and the second primer comprises a nucleic acid sequence complimentary to at least 15 contiguous nucleobases downstream of the risk allele located at nucleobase 501 within any one of SEQ ID NOS: 2001-2048, or 2057-2059.
[1196] 15. The method of any of embodiments 1-14, provided that the subject has been determined to be a carrier of the genotype by a process comprising DNA sequencing.
[1197] 16. The method of any of embodiments 1-15, provided that the subject further comprises soluble TL1A at a level greater than a control level derived from a non-diseased individual or population of non-diseased individuals.
[1198] 17. The method of any of embodiments 1-16, provided that the subject is homozygous for the genotype.
[1199] 18. The method of any of embodiments 1-17, wherein the genotype comprises at least two polymorphisms provided in Table 1 or Table 4.
[1200] 19. The method of any of embodiments 1-17, wherein the genotype comprises at least three polymorphisms provided in Table 1 or Table 4.
[1201] 20. The method of any of embodiments 1-17, wherein the genotype comprises at least four polymorphisms provided in Table 1 or Table 4.
[1202] 21. The method of any of embodiments 1-17, wherein the genotype comprises at least five polymorphisms provided in Table 1 or Table 4.
[1203] 22. The method of any of embodiments 1-17, wherein the genotype comprises at least six polymorphisms provided in Table 1 or Table 4.
[1204] 23. The method of any of embodiments 1-17, wherein the genotype comprises at least seven polymorphisms provided in Table 1 or Table 4.
[1205] 24. The method of any of embodiments 1-17, wherein the genotype comprises at least eight polymorphisms provided in Table 1 or Table 4.
[1206] 25. The method of any of embodiments 1-24, wherein the genotype comprises a polymorphism selected from the group consisting of a “G” allele at rs11897732 (SEQ ID NO: 2001), an “A” allele at rs6740739 (SEQ ID NO: 2002), a “G” allele at rs17796285 (SEQ ID NO: 2003), an “A” allele at rs7935393 (SEQ ID NO: 2004), a “G” allele at rs12934476 (SEQ ID NO: 2005), an “A” allele at rs12457255 (SEQ ID NO: 2006), an “A” allele at rs2070557 (SEQ ID NO: 2007), an “A” allele at rs4246905 (SEQ ID NO: 2008), an “A” allele at rs10974900 (SEQ ID NO: 2009), a “C” allele at rs12434976 (SEQ ID NO: 2010), an “A” allele at rs16901748 (SEQ ID NO: 20011), an “A” allele at rs2815844 (SEQ ID NO: 20012), a “G” allele at rs889702 (SEQ ID NO: 20013), a “C” allele at rs2409750 (SEQ ID NO: 20014), an “A” allele at rs1541020 (SEQ ID NO: 20015), a “T” allele at rs4942248 (SEQ ID NO: 20016), a “G” allele at rs12934476 (SEQ ID NO: 20017), an “A” allele at rs12457255 (SEQ ID NO: 20018), an “A” allele at rs2297437 (SEQ ID NO: 20019), a “G” allele at rs41309367 (SEQ ID NO: 20020), an “A” allele at rs10733509 (SEQ ID NO: 20021), a “G” allele at rs10750376 (SEQ ID NO: 20022), a “G” allele at rs10932456 (SEQ ID NO: 20023), an “A” allele at rs1326860 (SEQ ID NO: 20024), a “G” allele at rs1528663 (SEQ ID NO: 20025), a “C” allele at rs1892231 (SEQ ID NO: 20026), an “A” allele at rs951279 (SEQ ID NO: 20027), an “A” allele at rs9806914 (SEQ ID NO: 20028), an “A” allele at rs7935393 (SEQ ID NO: 20029), a “G” allele at rs1690492 (SEQ ID NO: 20030), an “A” allele at rs420726 (SEQ ID NO: 20031), a “T” allele at rs7759385 (SEQ ID NO: 20032), an “A” allele at rs10974900 (SEQ ID NO: 20033), an “A” allele at rs1326860 (SEQ ID NO: 20034), a “C” allele at rs2548147 (SEQ ID NO: 20035), an “A” allele at rs2815844 (SEQ ID NO: 20036), a “G” allele at rs889702 (SEQ ID NO: 20037), an “A” allele at rs9806914 (SEQ ID NO: 20038), an “A” allele at rs6478109 (SEQ ID NO: 20039), a “C” allele at rs7278257 (SEQ ID NO: 20040), an “A” allele at rs11221332 (SEQ ID NO: 20041), an “A” allele at rs56124762 (SEQ ID NO: 20057), a “G” at rs2070558 (SEQ ID NO: 20058), and a “T” allele at rs2070561 (SEQ ID NO: 20059).
[1207] 26. The method of embodiments 1-25, wherein the inhibitor of TL1A activity or expression is an anti-TL1A antibody.
[1208] 27. The method of embodiment 26, wherein the anti-TL1A antibody is selected from Table 20.
[1209] 28. The method of embodiment 26, wherein the anti-TL1A antibody comprises an amino acid sequence provided in Tables 16-17.
[1210] 29. The method of embodiment 26, wherein the anti-TL1A antibody binds to the same region of human TL1A as a reference antibody selected from Table 20.
[1211] 30. The method of embodiment 26, wherein the anti-TL1A antibody binds to the same region of human TL1A as a reference antibody, the reference antibody comprising an amino acid sequence provided in Tables 16-17.
[1212] 31. The method of embodiments 26-30, wherein the anti-TL1A antibody is a neutralizing TL1A antibody.
[1213] 32. The method of embodiments 26-31, wherein the anti-TL1A antibody is an antagonist of TL1A.
[1214] 33. A method of treating an inflammatory, fibrostenotic, and fibrotic, disease or condition in a subject comprising administering to the subject a therapeutically effective amount of an inhibitor of TL1A activity or expression, provided a presence of a genotype is detected in a sample obtained from the subject.
[1215] 34. A method of treating an inflammatory, fibrostenotic, or fibrotic, disease or condition in a subject comprising:
   [1216] a) analyzing a sample obtained from a subject to detect a presence or an absence of a genotype;
   [1217] b) detect the presence of the genotype in the sample obtained from the subject;
   [1218] c) administering to the subject a therapeutically effective amount of a TL1A antibody or antigen binding fragment from Tables 16-17 or 21.
[1219] 35. The method of embodiment 33-34, provided that the inflammatory, fibrostenotic, or fibrotic disease or condition comprises Crohn's disease, scleroderma, or pulmonary fibrosis (e.g., idiopathic pulmonary fibrosis).
[1220] 36. The method of embodiment 35, provided that the Crohn's disease comprises ileal, ileocolonic, or colonic Crohn's disease.
[1221] 37. The method of embodiment 33-34, provided that the inflammatory disease is ulcerative colitis (UC).
[1222] 38. The method of embodiment 37, provided that the UC is medically refractory UC.
[1223] 39. The method of any of embodiments 33-38, wherein the presence of the genotype is detected in the sample obtained from the subject by:
   [1224] a) contacting the sample comprising genetic material from the subject with a nucleic acid sequence capable of hybridizing to at least 10 contiguous nucleobases comprising a risk allele located at nucleoposition 501 within any one of SEQ ID NOS: 2001-2048, or 2057-2059; and
   [1225] b) detecting binding between the nucleic acid sequence and the at least 10 contiguous nucleobases comprising the risk allele.
[1226] 40. The method of embodiment 39, provided that the standard hybridization conditions comprise an annealing temperature between about 35° C. and about 65° C.
[1227] 41. The method of embodiment 39 or embodiment 40, provided that the standard hybridization conditions are performed with a TaqMan master mix solution.
[1228] 42. The method of any of embodiments 39-37, provided that the nucleic acid sequence is conjugated to a detectable molecule.
[1229] 43. The method of embodiment 42, provided that the detectable molecule comprises a fluorophore.
[1230] 44. The method of any of embodiments 39-43, provided that the nucleic acid sequence is conjugated to a quencher.
[1231] 45. The method of any of embodiments 39-44, provided that the sample comprising genetic material from the subject is amplified genetic material obtained from a nucleic acid amplification assay.
[1232] 46. The method of embodiment 45, provided that the nucleic acid amplification assay comprises amplification of DNA from the subject with a pair of primers capable of amplifying at least 15 contiguous nucleobases comprising the risk allele located at nucleoposition 501 within any one of SEQ ID NOS: 2001-2048, or 2057-2059, the pair of primers comprising a first primer and a second primer.
[1233] 47. The method of embodiment 46, provided that the first primer comprises a nucleic acid sequence complimentary to at least 15 contiguous nucleobases upstream of the risk allele located at nucleobase 501 within any one of SEQ ID NOS: 2001-2048, or 2057-2059, and the second primer comprises a nucleic acid sequence complimentary to at least 15 contiguous nucleobases downstream of the risk allele located at nucleobase 501 within any one of SEQ ID NOS: 2001-2048, or 2057-2059.
[1234] 48. The method of any of embodiments 34-47, the presence of the genotype is detected in the sample obtained from the subject by a process comprising DNA sequencing.
[1235] 49. The method of any of embodiments 34-48, provided that the subject further comprises soluble TL1A at a level greater than a control level derived from a non-diseased individual or population of non-diseased individuals.
[1236] 50. The method of any of embodiments 34-49, provided that the subject is homozygous for the genotype.
[1237] 51. The method of any of embodiments 34-50, wherein the genotype comprises at least two polymorphisms provided in Table 1 or Table 4.
[1238] 52. The method of any of embodiments 34-51, wherein the genotype comprises at least three polymorphisms provided in Table 1 or Table 4.
[1239] 53. The method of any of embodiments 34-52, wherein the genotype comprises at least four polymorphisms provided in Table 1 or Table 4.
[1240] 54. The method of any of embodiments 34-53, wherein the genotype comprises at least five polymorphisms provided in Table 1 or Table 4.
[1241] 55. The method of any of embodiments 34-54, wherein the genotype comprises at least six polymorphisms provided in Table 1 or Table 4.
[1242] 56. The method of any of embodiments 34-55, wherein the genotype comprises at least seven polymorphisms provided in Table 1 or Table 4.
[1243] 57. The method of any of embodiments 34-56, wherein the genotype comprises at least eight polymorphisms provided in Table 1 or Table 4.
[1244] 58. The method of any of embodiments 34-57, wherein the genotype comprises a polymorphism selected from the group consisting of a “G” allele at rs11897732 (SEQ ID NO: 2001), an “A” allele at rs6740739 (SEQ ID NO: 2002), a “G” allele at rs17796285 (SEQ ID NO: 2003), an “A” allele at rs7935393 (SEQ ID NO: 2004), a “G” allele at rs12934476 (SEQ ID NO: 2005), an “A” allele at rs12457255 (SEQ ID NO: 2006), an “A” allele at rs2070557 (SEQ ID NO: 2007), an “A” allele at rs4246905 (SEQ ID NO: 2008), an “A” allele at rs10974900 (SEQ ID NO: 2009), a “C” allele at rs12434976 (SEQ ID NO: 2010), an “A” allele at rs16901748 (SEQ ID NO: 20011), an “A” allele at rs2815844 (SEQ ID NO: 20012), a “G” allele at rs889702 (SEQ ID NO: 20013), a “C” allele at rs2409750 (SEQ ID NO: 20014), an “A” allele at rs1541020 (SEQ ID NO: 20015), a “T” allele at rs4942248 (SEQ ID NO: 20016), a “G” allele at rs12934476 (SEQ ID NO: 20017), an “A” allele at rs12457255 (SEQ ID NO: 20018), an “A” allele at rs2297437 (SEQ ID NO: 20019), a “G” allele at rs41309367 (SEQ ID NO: 20020), an “A” allele at rs10733509 (SEQ ID NO: 20021), a “G” allele at rs10750376 (SEQ ID NO: 20022), a “G” allele at rs10932456 (SEQ ID NO: 20023), an “A” allele at rs1326860 (SEQ ID NO: 20024), a “G” allele at rs1528663 (SEQ ID NO: 20025), a “C” allele at rs1892231 (SEQ ID NO: 20026), an “A” allele at rs951279 (SEQ ID NO: 2027), an “A” allele at rs9806914 (SEQ ID NO: 20028), an “A” allele at rs7935393 (SEQ ID NO: 20029), a “G” allele at rs1690492 (SEQ ID NO: 20030), an “A” allele at rs420726 (SEQ ID NO: 20031), a “T” allele at rs7759385 (SEQ ID NO: 20032), an “A” allele at rs10974900 (SEQ ID NO: 20033), an “A” allele at rs1326860 (SEQ ID NO: 20034), a “C” allele at rs2548147 (SEQ ID NO: 20035), an “A” allele at rs2815844 (SEQ ID NO: 20036), a “G” allele at rs889702 (SEQ ID NO: 20037), an “A” allele at rs9806914 (SEQ ID NO: 20038), an “A” allele at rs6478109 (SEQ ID NO: 20039), a “C” allele at rs7278257 (SEQ ID NO: 20040), an “A” allele at rs11221332 (SEQ ID NO: 20041) an “A” allele at rs56124762 (SEQ ID NO: 20057), a “G” at rs2070558 (SEQ ID NO: 20058), and a “T” allele at rs2070561 (SEQ ID NO: 20059).
[1245] 59. The method of embodiments 34-58, wherein the inhibitor of TL1A activity or expression is an anti-TL1A antibody.
[1246] 60. The method of embodiment 59, wherein the anti-TL1A antibody is selected from Table 20.
[1247] 61. The method of embodiment 59, wherein the anti-TL1A antibody comprises an amino acid sequence provided in Tables 16-17.
[1248] 62. The method of embodiment 59, wherein the anti-TL1A antibody binds to the same region of human TL1A as a reference antibody selected from Table 20.
[1249] 63. The method of embodiment 59, wherein the anti-TL1A antibody binds to the same region of human TL1A as a reference antibody, the reference antibody comprising an amino acid sequence provided in Tables 16-17.
[1250] 64. The method of embodiments 59-643, wherein the anti-TL1A antibody is a neutralizing TL1A antibody.
[1251] 65. The method of embodiments 59-64, wherein the anti-TL1A antibody is an antagonist of TL1A.
[1252] 66. A method of characterizing at least one of an inflammatory, fibrostenotic, and fibrotic, disease or condition of a subject, the method comprising assaying genetic material from the subject to identify the presence or absence of a genotype comprising a polymorphism provided in Table 1 or Table 4.
[1253] 67. The method of embodiment 66, further comprising assigning a more favorable prognosis to treatment with an inhibitor of TL1A activity or expression when the genotype is present.
[1254] 68. The method of embodiment 66, further comprising assigning a less favorable prognosis to with an inhibitor of TL1A activity or expression when the genotype is absent.
[1255] 69. The method of embodiment 66, further comprising assigning the subject to treatment with an inhibitor of TL1A activity or expression when the genotype is present.
[1256] 70. The method of embodiment 66, further comprising prescribing to the subject an inhibitor of TL1A activity or expression when the genotype is present.
[1257] 71. The method of embodiment 66, further comprising administering to the subject an inhibitor of anti-CD30 ligand activity or expression when the genotype is present.
[1258] 72. The method of any of embodiments 67-71, provided that the inhibitor of TL1A activity or expression is an anti-TL1A antibody or antigen-binding fragment thereof.
[1259] 73. The method of any of embodiments 67-72, provided that assaying comprises amplifying from the genetic material comprising at least 15 contiguous nucleobases including a risk allele located at nucleoposition 501 within any one of SEQ ID NOS: 2001-2048, or 2057-2059 using a pair of primers comprising a first primer and a second primer.
[1260] 74. The method of any of embodiment 73, provided that the first primer comprises a nucleic acid sequence complimentary to at least 15 contiguous nucleobases upstream of the risk allele located at nucleobase 501 within any one of SEQ ID NOS: 2001-2048, or 2057-2059, and the second primer comprises a nucleic acid sequence complimentary to at least 15 contiguous nucleobases downstream of the risk allele located at nucleobase 501 within any one of SEQ ID NOS: 2001-2048, or 2057-2059.
[1261] 75. The method of any of embodiments 66-74, provided that assaying comprises hybridizing to the genetic material a nucleic acid comprising any one of SEQ ID NOS: 2001-2048, or 2057-2059.
[1262] 76. The method of embodiment 75, provided that the nucleic acid sequence is conjugated to a detectable molecule.
[1263] 77. The method of embodiment 76, provided that the detectable molecule comprises a fluorophore.
[1264] 78. The method of any of embodiments 75-77, provided that the nucleic acid sequence is conjugated to a quencher.
[1265] 79. The method of any of embodiments 66-78, provided that assaying comprises DNA sequencing.
[1266] 80. The method of any of embodiments 66-79, further comprising measuring the level of TL1A in the subject.
[1267] 81. The method of any of embodiments 66-80, provided that the subject is homozygous for the genotype.
[1268] 82. The method of embodiments 66-81, wherein the genotype comprises at least two polymorphisms provided in Table 1 or Table 4.
[1269] 83. The method of any of embodiments 66-82, wherein the genotype comprises at least three polymorphisms provided in Table 1 or Table 4
[1270] 84. The method of any one of embodiments 66-83, wherein the genotype comprises at least one polymorphism comprising a non-reference allele.
[1271] 85. The method of any of embodiments 66-84, further comprising characterizing the at least one of the inflammatory, the fibrostenotic, and the fibrotic, disease or condition as Crohn's disease (CD) provided the genotype is present.
[1272] 86. The method of embodiment 85, provided that the CD comprises ileal, ileocolonic, or colonic CD.
[1273] 87. The method of any of embodiments 66-86, further comprising characterizing the at least one of the inflammatory, the fibrostenotic, and the fibrotic, disease or condition as a ulcerative colitis (UC), provided the genotype is present.
[1274] 88. The method of embodiment 87, provided that the fibrotic disease is medically refractory UC.
[1275] 89. The method of embodiment 72, wherein the anti-TL1A antibody is selected from Table 20.
[1276] 90. The method of embodiment 72, wherein the anti-TL1A antibody comprises an amino acid sequence provided in Tables 16-17.
[1277] 91. The method of embodiment 72, wherein the anti-TL1A antibody binds to the same region of human TL1A as a reference antibody selected from Table 20.
[1278] 92. The method of embodiment 72, wherein the anti-TL1A antibody binds to the same region of human TL1A as a reference antibody, the reference antibody comprising an amino acid sequence provided in Tables 16-17.
[1279] 93. The method of embodiments 89-92, wherein the anti-TL1A antibody is a neutralizing TL1A antibody.
[1280] 94. The method of embodiments 89-93, wherein the anti-TL1A antibody is an antagonist of TL1A.
[1281] 95. A method for detecting a genotype of interest in a subject comprising at least one of an inflammatory, a fibrostenotic, and a fibrotic, disease or condition, the method comprising
   [1282] (a) contacting genetic material from the subject with a composition sufficiently complementary to and capable of hybridizing to the genotype of interest, the composition comprising:
      [1283] (i) a detectably labeled oligonucleotide probe comprising at least 10 contiguous nucleobases provided in any one of SEQ ID NOS: 2001-2048, or 2057-2059,
      [1284] (ii) a detectably labeled oligonucleotide probe comprising at least 10 contiguous nucleobases provided in any one of SEQ ID NOS: 2001-2048, or 2057-2059,
      [1285] (iii) a detectably labeled oligonucleotide probe comprising at least 10 contiguous nucleobases provided in any one of SEQ ID NOS: 2001-2048, or 2057-2059,
      [1286] (iv) a detectably labeled oligonucleotide probe comprising a nucleic acid sequence that differs from a probe selected from the group consisting of (i)-(iii) by up to three nucleobases, provided the detectably labeled oligonucleotide probe of (iv) hybridizes to the genotype of interest,
      [1287] (v) a detectably labeled oligonucleotide probe comprising a nucleic acid sequence complementary to a probe selected from the group consisting of (i)-(iv), or
      [1288] (vi) a combination of probes selected from the group consisting of (i)-(v), wherein the detectably labeled oligonucleotide probe of (i), (ii), and (iii) are different,
   [1289] (b) detecting the presence or absence of hybridization of the genetic material with the composition using the detectably labeled probe, whereby hybridization of the genetic material with the composition is indicative of the presence of the genotype of interest in the subject.
[1290] 96. The method of embodiment 95, provided that the presence of the genotype of interest is indicative of the subject comprising elevated levels of TL1A.
[1291] 97. The method of embodiment 95 or embodiment 96, provided that the inflammatory, fibrostenotic, or fibrotic disease or condition comprises Crohn's disease (CD), scleroderma, or pulmonary fibrosis (e.g., idiopathic pulmonary fibrosis).
[1292] 98. The method of embodiment 97, provided that the CD comprises ileal, ileocolonic, or colonic CD.
[1293] 99. The method of embodiments 99 or 92, provided that the inflammatory disease is ulcerative colitis (UC).
[1294] 100. A method of treating the at least one of an inflammatory disease, a fibrostenotic disease, in the subject of any one of embodiments 95-99, the method comprising:
   [1295] a) administering to the subject of any of embodiments 95-89 a therapeutically effective amount of an inhibitor of TL1A activity or expression, provided that the subject comprises the genotype of interest.
[1296] 101. The method of embodiment 100, provided that the inhibitor of TL1A activity comprises an anti-TL1A ligand antibody or antigen binding fragment thereof.
[1297] 102. A composition comprising at least 10 but less than 50 contiguous nucleobase residues of any one of SEQ ID NOS: 2001-2048, or 2057-2059 or its complement, wherein the contiguous nucleobase residues comprise the nucleobase at position 501 of the any one of SEQ ID NOS: 2001-2048, or 2057-2059, and wherein the contiguous nucleobase residues are connected to a detectable molecule.
[1298] 103. The composition of embodiment 102, provided that the detectable molecule is a fluorophore.
[1299] 104. The composition of embodiments 102-103, wherein the contiguous nucleobase residues comprise the nucleobase at position 501 of any one of SEQ ID NOS: 2001-2048, or 2057-2059.
[1300] 105. The composition of embodiments 102-104, wherein the contiguous nucleobase residues comprise the nucleobase at position 501 of any one of SEQ ID NOS: 2060-2108, or 364141-364142.
[1301] 106. The composition of embodiments 102-105, provided that the contiguous nucleobase residues are connected to a quencher.
[1302] 107. A kit comprising the composition of any of embodiments 102-106, and a primer pair capable of amplifying at least 15 contiguous nucleic acid molecules of any one of SEQ ID NOS: 2001-2048, or 2057-2059, the at least 15 contiguous nucleic acid molecules comprising the nucleic acid located at position 501 of any one of SEQ ID NOS: 2001-2048, or 2057-2059.
[1303] 108. A method comprising contacting DNA from a subject with the composition of any of embodiments 102-106 or the kit of any of embodiment 107 under conditions configured to hybridize the composition to the DNA if the DNA comprises a sequence complementary to the composition.
[1304] 109. A method comprising treating the subject of embodiment 108 with an inhibitor of TL1A activity or expression, provided that the DNA from the subject comprises the sequence complementary to the composition.
[1305] 110. The method of embodiment 109, provided that the inhibitor of TL1A comprises an anti-TL1A antibody or antigen binding fragment thereof.
[1306] 111. A method of identifying a risk of developing a TL1A mediated disease or condition comprising at least one of an inflammatory, a fibrostenotic, and a fibrotic, disease or condition in a subject, the method comprising:
   [1307] a) assaying a sample obtained from the subject to identify the presence of a genotype comprising a polymorphism provided in Table 1 or Table 4, or a polymorphism in linkage disequilibrium (LD) therewith; and
   [1308] b) identifying the risk of developing at least one of an inflammatory, a fibrostenotic, and a fibrotic, disease or condition in the subject, provided the presence of the genotype is identified in step (a).
[1309] 112. A method of selecting a subject for treatment, the method comprising:
   [1310] a) assaying a sample obtained from the subject to identify the presence of a genotype comprising a polymorphism provided in Table 1 or Table 4, or a polymorphism in linkage disequilibrium (LD) therewith; and
   [1311] b) selecting the subject for treatment with an inhibitor of TL1A activity or expression, provided the presence of the genotype is identified in step (a).
[1312] 113. The method of any of embodiments 111-112, provided that the subject is homozygous for the genotype.
[1313] 114. The method of any of embodiments 111-113, wherein the genotype comprises at least two polymorphisms provided in Table 1 or Table 4.
[1314] 115. The method of any of embodiments 111-114, wherein the genotype comprises at least three polymorphisms provided in Table 1 or Table 4.
[1315] 116. The method of any of embodiments 111-115, wherein the genotype comprises at least four polymorphisms provided in Table 1 or Table 4.
[1316] 117. The method of any of embodiments 111-116, wherein the genotype comprises at least five polymorphisms provided in Table 1 or Table 4.
[1317] 118. The method of any of embodiments 111-117, wherein the genotype comprises at least six polymorphisms provided in Table 1 or Table 4.
[1318] 119. The method of any of embodiments 111-118, wherein the genotype comprises at least seven polymorphisms provided in Table 1 or Table 4.
[1319] 120. The method of any of embodiments 111-119, wherein the genotype comprises at least eight polymorphisms provided in Table 1 or Table 4.
[1320] 121. The method of any of embodiments 111-1220, wherein the genotype comprises at least one polymorphism comprising a non-reference allele.
[1321] 122. The method of embodiments 111-121, further comprising treating the subject by administering to the subject a therapeutically effective amount of an inhibitor of TL1A activity or expression.
[1322] 123. The method of embodiment 122, wherein the inhibitor of TL1A activity or expression is an anti-TL1A antibody.
[1323] 124. The method of embodiment 123, wherein the anti-TL1A antibody is selected from Table 20.
[1324] 125. The method of embodiment 123, wherein the anti-TL1A antibody comprises an amino acid sequence provided in Tables 16-17.
[1325] 126. The method of embodiment 123, wherein the anti-TL1A antibody binds to the same region of human TL1A as a reference antibody selected from Table 20.
[1326] 127. The method of embodiment 123, wherein the anti-TL1A antibody binds to the same region of human TL1A as a reference antibody, the reference antibody comprising an amino acid sequence provided in Tables 16-17.
[1327] 128. The method of embodiments 123-128, wherein the anti-TL1A antibody is a neutralizing TL1A antibody.
[1328] 129. The method of embodiments 123-129, wherein the anti-TL1A antibody is an antagonist of TL1A.
[1329] 130. The methods of embodiments 33-65 or 111-121, further comprising administering a therapeutically effective amount of an additional therapeutic agent.
[1330] 131. The method of embodiment 130, wherein the additional therapeutic agent is a modulator of Receptor Interacting Serine/Threonine Kinase 2 (RIPK2).
[1331] 132. The method of embodiment 130, wherein the additional therapeutic agent is a modulator of G Protein-Coupled Receptor 35 (GPR35).
[1332] 133. The method of embodiment 130, wherein the additional therapeutic agent is a modulator of CD30 ligand (CD30L)
[1333] 134. The method of any one of embodiments 1-134, further comprising predicting a positive therapeutic response in a subject to a treatment with the inhibitor of TL1A activity or expression with a positive predictive value of at least or about 50%, 55%, 60%, 65%, 70%, 75%, 80%, 85%, 90%, 91%, 92%, 93%, 94%95% 96% 97% 98% 99% or 100%.
[1334] 135. The method of any one of embodiments 1-135, further comprising predicting a positive therapeutic response in a subject to a treatment with the inhibitor of TL1A activity or expression with a specificity of at least or about 50%, 55%, 60%, 65%, 70%, 75%, 80%, 85%, 90%, 91%, 92%, 93%, 94%95% 96% 97% 98% 99% or 100%.
[1335] 136. A method of treating an inflammatory, a fibrotic, or a fibrostenotic disease or condition in a subject, the method comprising administering to the subject a therapeutically effective amount of an inhibitor of Tumor necrosis factor-like cytokine 1A (TL1A) activity or expression, provided at least three polymorphisms comprising rs1892231, rs56124762, rs6478109, rs2070558, rs2070561, rs11897732, rs6740739, rs17796285, rs7935393, rs12934476, rs12457255, rs2070557, rs4246905, rs10974900, rs12434976, rs16901748, rs2815844, rs889702, rs2409750, rs1541020, rs4942248, rs12934476, rs12457255, rs2297437, rs41309367, rs10733509, rs10750376, rs10932456, rs1326860, rs1528663, rs951279, rs9806914, rs7935393, rs1690492, rs420726, rs7759385, rs10974900, rs1326860, rs2548147, rs2815844, rs889702, rs9806914, rs7278257, or rs11221332, or a proxy polymorphism in linkage disequilibrium therewith as determined with an R² of at least 0.85, or a combination thereof, are detected in a sample obtained from the subject; wherein the inhibitor of TL1A activity is an antibody or antigen binding fragment as described herein.
[1336] 137. The method of embodiment 136, wherein the at least three polymorphisms are predictive of a positive therapeutic response in the subject to a treatment with the inhibitor of TL1A activity or expression at a positive predictive value of at least about 70%.
[1337] 138. The method of embodiment 136, wherein the at least three polymorphisms are predictive of positive therapeutic response in the subject to a treatment with the inhibitor of TL1A activity or expression with a specificity of at least about 70%.
[1338] 139. The method of embodiment 136, wherein the at least three polymorphisms comprise:
   [1339] (a) rs6478109, rs56124762, and rs1892231;
   [1340] (b) rs6478109, rs56124762, and rs16901748;
   [1341] (c) rs6478109, rs1892231, and rs16901748;
   [1342] (d) rs56124762, rs1892231, and rs16901748;
   [1343] (e) rs6478109, rs2070558, and rs1892231;
   [1344] (f) rs6478109, rs2070558, and rs16901748;
   [1345] (g) rs6478109, rs1892231, and rs16901748;
   [1346] (h) rs2070558, rs1892231, and rs16901748;
   [1347] (i) rs6478109, rs2070561, and rs1892231;
   [1348] (j) rs6478109, rs2070561, and rs16901748;
   [1349] (k) rs6478109, rs1892231, and rs16901748;
   [1350] (1) rs2070561, rs1892231, and rs16901748;
   [1351] (m) rs6478109, rs7935393, and rs1892231;
   [1352] (n) rs6478109, rs7935393, and rs9806914;
   [1353] (o) rs6478109, rs7935393, and rs7278257;
   [1354] (p) rs6478109, rs7935393, and rs2070557;
   [1355] (q) rs6478109, rs1892231, and rs9806914;
   [1356] (r) rs6478109, rs1892231, and rs7278257;
   [1357] (s) rs6478109, rs1892231, and rs2070557;
   [1358] (t) rs6478109, rs9806914, and rs7278257;
   [1359] (u) rs6478109, rs9806914, and rs2070557;
   [1360] (v) rs6478109, rs7278257, and rs2070557;
   [1361] (w) rs7935393, rs1892231, and rs9806914;
   [1362] (x) rs7935393, rs1892231, and rs7278257;
   [1363] (y) rs7935393, rs1892231, and rs2070557;
   [1364] (z) rs7935393, rs9806914, and rs7278257;
   [1365] (aa) rs7935393, rs9806914, and rs2070557;
   [1366] (bb) rs7935393, rs7278257, and rs2070557;
   [1367] (cc) rs1892231, rs9806914, and rs7278257;
   [1368] (dd) rs1892231, rs9806914, and rs2070557;
   [1369] (ee) rs1892231, rs7278257, and rs2070557; or
   [1370] (ff) rs9806914, rs7278257, and rs2070557.
[1371] 140. The method of embodiment 136, wherein the at least three polymorphisms further comprises a fourth polymorphism comprising rs16901748, rs1892231, rs56124762, rs6478109, rs2070558, rs2070561, rs11897732, rs6740739, rs17796285, rs7935393, rs12934476, rs12457255, rs2070557, rs4246905, rs10974900, rs12434976, rs2815844, rs889702, rs2409750, rs1541020, rs4942248, rs12934476, rs12457255, rs2297437, rs41309367, rs10733509, rs10750376, rs10932456, rs1326860, rs1528663, rs951279, rs9806914, rs7935393, rs1690492, rs420726, rs7759385, rs10974900, rs1326860, rs2548147, rs2815844, rs889702, rs9806914, rs7278257, or rs11221332, or a proxy polymorphism in linkage disequilibrium therewith as determined with an R² of at least 0.85, or a combination thereof.
[1372] 141. The method of method of embodiment 136, wherein the at least three polymorphisms are detected in the sample by subjecting the sample to an assay configured to detect a presence of at least three nucleotides corresponding to nucleic acid position 501 within at least three of SEQ ID NOS: 2001-2041, or 2057-2059.
[1373] 142. The method of embodiment 136, wherein the at least eight polymorphisms are predictive of a positive therapeutic response in the subject to a treatment with the inhibitor of TL1A activity or expression at a positive predictive value of at least about 70%.
[1374] 143. The method of embodiment 136, wherein the at least eight polymorphisms are predictive of positive therapeutic response in the subject to a treatment with the inhibitor of TL1A activity or expression with a specificity of at least about 70%.
[1375] 144. The method of embodiment 136, wherein the at least eight polymorphism s comprise a set of polymorphisms selected from Table 25.
[1376] 145. The method of embodiment 1, wherein the inflammatory, fibrotic, or fibrostenotic disease or condition comprises inflammatory bowel disease, Crohn's disease, obstructive Crohn's disease, ulcerative colitis, intestinal fibrosis, intestinal fibrostenosis, rheumatoid arthritis, pulmonary fibrosis (e.g., idiopathic pulmonary fibrosis), scleroderma, or primary sclerosing cholangitis.
[1377] 146. The method of embodiment 145, wherein the Crohn's disease is ileal, ileocolonic, or colonic Crohn's disease.
[1378] 147. The method of embodiment 136, wherein the subject has, or is at risk for developing, a non-response or loss-of-response to a standard therapy comprising glucocorticosteriods, anti-TNF therapy, anti-a4-b7 therapy, anti-IL12p40 therapy, or a combination thereof.
[1379] 148. The method of embodiment 136, wherein the inhibitor of TL1A is an anti-TL1A antibody or antigen-binding fragment.
[1380] 149. A method of treating an inflammatory, a fibrotic, or a fibrostenotic disease or condition in a subject, the method comprising:
   [1381] (a) determining whether the subject with an inflammatory, a fibrotic, or a fibrostenotic disease or condition is suitable for treatment with an inhibitor of TL1A activity or expression by:
      [1382] (i) obtaining or having obtained a sample from the subject; and
      [1383] (ii) subjecting the sample to an assay adapted to detect at least three polymorphisms comprising rs1892231, rs56124762, rs6478109, rs2070558, rs2070561, rs11897732, rs6740739, rs17796285, rs7935393, rs12934476, rs12457255, rs2070557, rs4246905, rs10974900, rs12434976, rs16901748, rs2815844, rs889702, rs2409750, rs1541020, rs4942248, rs12934476, rs12457255, rs2297437, rs41309367, rs10733509, rs10750376, rs10932456, rs1326860, rs1528663, rs951279, rs9806914, rs7935393, rs1690492, rs420726, rs7759385, rs10974900, rs1326860, rs2548147, rs2815844, rs889702, rs9806914, rs7278257, rs11221332, or a proxy polymorphism in linkage disequilibrium therewith as determined with an R² of at least 0.85, or a combination thereof; and
   [1384] (b) treating the subject by administering a therapeutically effective amount of the inhibitor of TL1A activity or expression to the subject;
   [1385] wherein the inhibitor of TL1A activity or expression is an anti-TL1A antibody or antigen as described herein.
[1386] 150. The method of embodiment 149, wherein the at least three polymorphisms are predictive of a positive therapeutic response in the subject to a treatment with the inhibitor of TL1A activity or expression at a positive predictive value of at least about 70%.
[1387] 151. The method of embodiment 149, wherein the at least three polymorphisms are predictive of a positive therapeutic response in the subject to a treatment with the inhibitor of TL1A activity or expression at a specificity of at least about 70%.
[1388] 152. A method of treating an inflammatory, a fibrotic, or a fibrostenotic disease or condition in a subject, the method comprising:
   [1389] (c) determining whether the subject with an inflammatory, a fibrotic, or a fibrostenotic disease or condition is suitable for treatment with an inhibitor of TL1A activity or expression by:
      [1390] (iii) obtaining or having obtained a sample from the subject; and
      [1391] (iv) subjecting the sample to an assay adapted to detect at least eight polymorphisms comprising rs1892231, rs56124762, rs6478109, rs2070558, rs2070561, rs11897732, rs6740739, rs17796285, rs7935393, rs12934476, rs12457255, rs2070557, rs4246905, rs10974900, rs12434976, rs16901748, rs2815844, rs889702, rs2409750, rs1541020, rs4942248, rs12934476, rs12457255, rs2297437, rs41309367, rs10733509, rs10750376, rs10932456, rs1326860, rs1528663, rs951279, rs9806914, rs7935393, rs1690492, rs420726, rs7759385, rs10974900, rs1326860, rs2548147, rs2815844, rs889702, rs9806914, rs7278257, rs11221332, or a proxy polymorphism in linkage disequilibrium therewith as determined with an R² of at least 0.85, or a combination thereof; and
   [1392] (d) treating the subject by administering a therapeutically effective amount of the inhibitor of TL1A activity or expression to the subject;
   [1393] wherein the inhibitor of TL1A activity or expression is an anti-TL1A antibody or antigen as described herein.
[1394] 153. The method of embodiment 152, wherein the at least eight polymorphisms are predictive of a positive therapeutic response in the subject to a treatment with the inhibitor of TL1A activity or expression at a positive predictive value of at least about 70%.
[1395] 154. The method of embodiment 152, wherein the at least eight polymorphisms are predictive of a positive therapeutic response in the subject to a treatment with the inhibitor of TL1A activity or expression at a specificity of at least about 70%.
[1396] 155. The method of embodiment 136, wherein the inflammatory, fibrotic, or fibrostenotic disease or condition comprises inflammatory bowel disease, Crohn's disease, obstructive Crohn's disease, ulcerative colitis, intestinal fibrosis, intestinal fibrostenosis, rheumatoid arthritis, pulmonary fibrosis (e.g., idiopathic pulmonary fibrosis), scleroderma, or primary sclerosing cholangitis.
[1397] 156. The method of embodiment 156, wherein the Crohn's disease is ileal, ileocolonic, or colonic Crohn's disease.
[1398] 157. The method of embodiment 149, wherein the wherein the inhibitor of TL1A activity or expression is an anti-TL1A antibody or antigen-binding fragment.
[1399] 158. The method of embodiment 149, wherein the at least three polymorphisms comprise:
   [1400] (a) rs6478109, rs56124762, and rs1892231;
   [1401] (b) rs6478109, rs56124762, and rs16901748;
   [1402] (c) rs6478109, rs1892231, and rs16901748;
   [1403] (d) rs56124762, rs1892231, and rs16901748;
   [1404] (e) rs6478109, rs2070558, and rs1892231;
   [1405] (f) rs6478109, rs2070558, and rs16901748;
   [1406] (g) rs6478109, rs1892231, and rs16901748;
   [1407] (h) rs2070558, rs1892231, and rs16901748;
   [1408] (i) rs6478109, rs2070561, and rs1892231;
   [1409] (j) rs6478109, rs2070561, and rs16901748;
   [1410] (k) rs6478109, rs1892231, and rs16901748;
   [1411] (l) rs2070561, rs1892231, and rs16901748;
   [1412] (m) rs6478109, rs7935393, and rs1892231;
   [1413] (n) rs6478109, rs7935393, and rs9806914;
   [1414] (o) rs6478109, rs7935393, and rs7278257;
   [1415] (p) rs6478109, rs7935393, and rs2070557;
   [1416] (q) rs6478109, rs1892231, and rs9806914;
   [1417] (r) rs6478109, rs1892231, and rs7278257;
   [1418] (s) rs6478109, rs1892231, and rs2070557;
   [1419] (t) rs6478109, rs9806914, and rs7278257;
   [1420] (u) rs6478109, rs9806914, and rs2070557;
   [1421] (v) rs6478109, rs7278257, and rs2070557;
   [1422] (w) rs7935393, rs1892231, and rs9806914;
   [1423] (x) rs7935393, rs1892231, and rs7278257;
   [1424] (y) rs7935393, rs1892231, and rs2070557;
   [1425] (z) rs7935393, rs9806914, and rs7278257;
   [1426] (aa) rs7935393, rs9806914, and rs2070557;
   [1427] (bb) rs7935393, rs7278257, and rs2070557;
   [1428] (cc) rs1892231, rs9806914, and rs7278257;
   [1429] (dd) rs1892231, rs9806914, and rs2070557;
   [1430] (ee) rs1892231, rs7278257, and rs2070557; or
   [1431] (ff) rs9806914, rs7278257, and rs2070557.
[1432] 159. The method of embodiment 136, wherein the at least three polymorphisms further comprises a fourth polymorphism comprising rs16901748, rs1892231, rs56124762, rs6478109, rs2070558, rs2070561, rs11897732, rs6740739, rs17796285, rs7935393, rs12934476, rs12457255, rs2070557, rs4246905, rs10974900, rs12434976, rs2815844, rs889702, rs2409750, rs1541020, rs4942248, rs12934476, rs12457255, rs2297437, rs41309367, rs10733509, rs10750376, rs10932456, rs1326860, rs1528663, rs951279, rs9806914, rs7935393, rs1690492, rs420726, rs7759385, rs10974900, rs1326860, rs2548147, rs2815844, rs889702, rs9806914, rs7278257, or rs11221332 or a proxy polymorphism in linkage disequilibrium therewith as determined with an R² of at least 0.85, or a combination thereof.
[1433] 160. The method of embodiment 136, wherein the subject is at risk of developing a non-response or loss-of-response to a standard therapy comprising glucocorticosteriods, anti-TNF therapy, anti-a4-b7 therapy, anti-IL12p40 therapy, or a combination thereof.
[1434] 161. A method of treating an inflammatory, a fibrotic, or a fibrostenotic disease or condition in a subject, the method comprising administering to the subject a therapeutically effective amount of an inhibitor of TL1A activity or expression, wherein the subject expresses at least three polymorphisms comprising rs16901748, rs6478109, rs56124762, or a proxy polymorphism in linkage disequilibrium therewith as determined with an R² of at least 0.85;
[1435] wherein the inhibitor of TL1A activity of expression is anti-TL1A antibody or antigen-binding fragment as described herein.
[1436] 162. A method of treating an inflammatory, a fibrotic, or a fibrostenotic disease or condition in a subject, the method comprising administering to the subject a therapeutically effective amount of an inhibitor of Tumor necrosis factor-like cytokine 1A (TL1A) activity or expression,
[1437] wherein at least three polymorphisms that are predictive of a positive therapeutic response in the subject to a treatment with the inhibitor of TL1A activity or expression with a positive predictive value or a specificity of at least about 51%, are detected in a sample obtained from the subject, and wherein the inhibitor of TL1A activity or expression comprises a antibody or antigen-binding fragment that specifically binds to a tumor necrosis factor-like protein 1A (TL1A) polypeptide,
[1438] wherein said antibody or antigen-binding fragment comprises:
   [1439] a) a heavy chain comprising a heavy chain complementarity determining region 1 (HCDR1), a heavy chain complementarity determining region 2 (HCDR2), and a heavy chain complementarity determining region 3 (HCDR3), wherein the HCDR1 comprises a first amino acid sequence of DTYMH of SEQ ID NO: 601; the HCDR2 comprises a second amino acid sequence of PASGH of SEQ ID NO: 768; and the HCDR3 comprises a third amino acid sequence of SGGLPD of SEQ ID NO: 805; and
   [1440] b) a light chain comprising a light chain complementarity determining region 1 (LCDR1), a light chain complementarity determining region 2 (LCDR2), and a light chain complementarity determining region 3 (LCDR3), wherein the LCDR1 comprises a fourth amino acid sequence of ASSSVSYMY of SEQ ID NO: 851; the LCDR2 comprises a fifth amino acid sequence of ATSNLAS of SEQ ID NO: 11; and the LCDR3 comprises a sixth amino acid sequence of GNPRT of SEQ ID NO: 921.
[1441] 163. The method of embodiment 163, provided that the antibody or antigen-binding fragment is a chimeric antibody, a CDR-grafted antibody, a humanized antibody, a Fab, a Fab′, a F(ab′)2, a Fv, a disulfide linked Fv, a scFv, a single domain antibody, a diabody, a multispecific antibody, a dual specific antibody, an anti-idiotypic antibody, a bispecific antibody, or a combination thereof.
[1442] 164. The method of embodiment 163, provided that the antibody or antigen-binding fragment is a humanized antibody.
[1443] 165. The method of embodiment 163, where the antibody or antigen-binding fragment of embodiment 141 is administered with a pharmaceutically acceptable carrier.
[1444] 166. The method of embodiment 163, provided the antibody or antigen binding fragment is an immunoglobulin G (IgG).
[1445] 167. The method of embodiment 165, provided the IgG comprises an IgG1.
[1446] 168. The method of embodiment 164, provided the IgG comprises an IgG2.
[1447] 169. A method of treating an inflammatory, a fibrotic, or a fibrostenotic disease or condition in a subject, the method comprising administering to the subject a therapeutically effective amount of an inhibitor of Tumor necrosis factor-like cytokine 1A (TL1A) activity or expression,
[1448] wherein at least three polymorphisms that are predictive of a positive therapeutic response in the subject to a treatment with the inhibitor of TL1A activity or expression with a positive predictive value or a specificity of at least about 51%, are detected in a sample obtained from the subject, and wherein the inhibitor of TL1A activity or expression comprises a antibody or antigen-binding fragment that specifically binds to a tumor necrosis factor-like protein 1A (TL1A) polypeptide,
[1449] wherein said antibody or antigen-binding fragment comprises an antibody or antigen binding fragment thereof that binds to TL1A, comprising a heavy chain variable region comprising complementarity determining regions (CDRs) as set forth in SEQ ID NOS: 3001, 3002, and 3006; and a light chain variable region comprising CDRs as set forth in SEQ ID NOS: 3010, 3011, and 3013.
[1450] 170. A method of treating an inflammatory, a fibrotic, or a fibrostenotic disease or condition in a subject, the method comprising administering to the subject a therapeutically effective amount of an inhibitor of Tumor necrosis factor-like cytokine 1A (TL1A) activity or expression,
[1451] wherein at least eight polymorphisms that are predictive of a positive therapeutic response in the subject to a treatment with the inhibitor of TL1A activity or expression with a positive predictive value or a specificity of at least about 51%, are detected in a sample obtained from the subject, and wherein the inhibitor of TL1A activity or expression comprises a antibody or antigen-binding fragment that specifically binds to a tumor necrosis factor-like protein 1A (TL1A) polypeptide, wherein said antibody or antigen-binding fragment comprises an antibody or antigen binding fragment thereof that binds to TL1A, comprising a heavy chain variable region comprising complementarity determining regions (CDRs) as set forth in SEQ ID NOS: 3001, 3002, and 3006; and a light chain variable region comprising CDRs as set forth in SEQ ID NOS: 3010, 3011, and 3013.
[1452] 171. The method of embodiment 170 or 171, wherein the light chain variable region comprises SEQ ID NO: 3204.
[1453] 172. A method of treating an inflammatory, a fibrotic, or a fibrostenotic disease or condition in a subject, the method comprising administering to the subject a therapeutically effective amount of an inhibitor of Tumor necrosis factor-like cytokine 1A (TL1A) activity or expression,
[1454] wherein at least three polymorphisms that are predictive of a positive therapeutic response in the subject to a treatment with the inhibitor of TL1A activity or expression with a positive predictive value or a specificity of at least about 51%, are detected in a sample obtained from the subject, and wherein the inhibitor of TL1A activity or expression comprises a antibody or antigen-binding fragment that specifically binds to a tumor necrosis factor-like protein 1A (TL1A) polypeptide, comprising a heavy chain variable region comprising complementarity determining regions (CDRs) as set forth in SEQ ID NOS: 3001, 3005, and 3008; and a light chain variable region comprising CDRs as set forth in SEQ ID NOS: 3010, 3011, and 3012.
[1455] 173. A method of treating an inflammatory, a fibrotic, or a fibrostenotic disease or condition in a subject, the method comprising administering to the subject a therapeutically effective amount of an inhibitor of Tumor necrosis factor-like cytokine 1A (TL1A) activity or expression,
[1456] wherein at least eight polymorphisms that are predictive of a positive therapeutic response in the subject to a treatment with the inhibitor of TL1A activity or expression with a positive predictive value or a specificity of at least about 51%, are detected in a sample obtained from the subject, and wherein the inhibitor of TL1A activity or expression comprises a antibody or antigen-binding fragment that specifically binds to a tumor necrosis factor-like protein 1A (TL1A) polypeptide, comprising a heavy chain variable region comprising complementarity determining regions (CDRs) as set forth in SEQ ID NOS: 3001, 3005, and 3008; and a light chain variable region comprising CDRs as set forth in SEQ ID NOS: 3010, 3011, and 3012.
[1457] 174. The method of embodiment 173 or 174, wherein the light chain variable region comprises SEQ ID NO: 3202.
[1458] 175. The method of any one of embodiments 173-175, wherein the heavy chain variable region comprises SEQ ID NO: 3121.
[1459] 176. The method of any one of embodiments 173-175, wherein the heavy chain variable region comprises SEQ ID NO: 3122.
[1460] 177. The method of any one of embodiments 173-175, wherein the heavy chain variable region comprises SEQ ID NO: 3123.
[1461] 178. The method of any one of embodiments 173-175, wherein the heavy chain variable region comprises SEQ ID NO: 3124.
[1462] 179. The method of embodiments 173 or 174, wherein the light chain variable region comprises SEQ ID NO: 3205.
[1463] 180. The method of embodiment 173 or embodiment 174, wherein the heavy chain variable region comprises SEQ ID NO: 3122.
[1464] 181. The method of embodiment 173 or embodiment 174, wherein the heavy chain variable region comprises SEQ ID NO: 3124.
[1465] 182. A method of treating an inflammatory, a fibrotic, or a fibrostenotic disease or condition in a subject, the method comprising administering to the subject a therapeutically effective amount of an inhibitor of Tumor necrosis factor-like cytokine 1A (TL1A) activity or expression,
[1466] wherein at least three polymorphisms that are predictive of a positive therapeutic response in the subject to a treatment with the inhibitor of TL1A activity or expression with a positive predictive value or a specificity of at least about 51%, are detected in a sample obtained from the subject, and wherein the inhibitor of TL1A activity or expression comprises a antibody or antigen-binding fragment that specifically binds to a tumor necrosis factor-like protein 1A (TL1A) polypeptide, comprising a heavy chain variable region comprising complementarity determining regions (CDRs) as set forth in SEQ ID NOS: 3001, 3005, and 3008; and a light chain variable region comprising CDRs as set forth in SEQ ID NOS: 3010, 3011, and 3013.
[1467] 183. A method of treating an inflammatory, a fibrotic, or a fibrostenotic disease or condition in a subject, the method comprising administering to the subject a therapeutically effective amount of an inhibitor of Tumor necrosis factor-like cytokine 1A (TL1A) activity or expression,
[1468] wherein at least eight polymorphisms that are predictive of a positive therapeutic response in the subject to a treatment with the inhibitor of TL1A activity or expression with a positive predictive value or a specificity of at least about 51%, are detected in a sample obtained from the subject, and wherein the inhibitor of TL1A activity or expression comprises a antibody or antigen-binding fragment that specifically binds to a tumor necrosis factor-like protein 1A (TL1A) polypeptide, comprising a heavy chain variable region comprising complementarity determining regions (CDRs) as set forth in SEQ ID NOS: 3001, 3005, and 3008; and a light chain variable region comprising CDRs as set forth in SEQ ID NOS: 3010, 3011, and 3013.
[1469] 184. The method of embodiment 183 or 184, wherein the heavy chain variable region comprises SEQ ID NO: 3122.
[1470] 185. The method of embodiment 183 or embodiment 184, wherein the light chain variable region comprises SEQ ID NO: 3204.
[1471] 186. The method of embodiment 183 or embodiment 184, wherein the light chain variable region comprises SEQ ID NO: 3206.
[1472] 187. A method of treating an inflammatory, a fibrotic, or a fibrostenotic disease or condition in a subject, the method comprising administering to the subject a therapeutically effective amount of an inhibitor of Tumor necrosis factor-like cytokine 1A (TL1A) activity or expression,
[1473] wherein at least three polymorphisms that are predictive of a positive therapeutic response in the subject to a treatment with the inhibitor of TL1A activity or expression with a positive predictive value or a specificity of at least about 51%, are detected in a sample obtained from the subject, and wherein the inhibitor of TL1A activity or expression comprises a antibody or antigen-binding fragment that specifically binds to a tumor necrosis factor-like protein 1A (TL1A) polypeptide, comprising a heavy chain variable region comprising complementarity determining regions (CDRs) as set forth in SEQ ID NOS: 3001, 3003, and 3008; and a light chain variable region comprising CDRs as set forth in SEQ ID NOS: 3010, 3011, and 3013.
[1474] 188. A method of treating an inflammatory, a fibrotic, or a fibrostenotic disease or condition in a subject, the method comprising administering to the subject a therapeutically effective amount of an inhibitor of Tumor necrosis factor-like cytokine 1A (TL1A) activity or expression,
[1475] wherein at least eight polymorphisms that are predictive of a positive therapeutic response in the subject to a treatment with the inhibitor of TL1A activity or expression with a positive predictive value or a specificity of at least about 51%, are detected in a sample obtained from the subject, and wherein the inhibitor of TL1A activity or expression comprises a antibody or antigen-binding fragment that specifically binds to a tumor necrosis factor-like protein 1A (TL1A) polypeptide, comprising a heavy chain variable region comprising complementarity determining regions (CDRs) as set forth in SEQ ID NOS: 3001, 3003, and 3008; and a light chain variable region comprising CDRs as set forth in SEQ ID NOS: 3010, 3011, and 3013.
[1476] 189. The method of embodiment 188 or 189, wherein the heavy chain variable region comprises SEQ ID NO: 3128.
[1477] 190. The method of embodiment 188 or 189, wherein the light chain variable region comprises SEQ ID NO: 3206.
[1478] 191. A method of treating an inflammatory, a fibrotic, or a fibrostenotic disease or condition in a subject, the method comprising administering to the subject a therapeutically effective amount of an inhibitor of Tumor necrosis factor-like cytokine 1A (TL1A) activity or expression,
[1479] wherein at least three polymorphisms that are predictive of a positive therapeutic response in the subject to a treatment with the inhibitor of TL1A activity or expression with a positive predictive value or a specificity of at least about 51%, are detected in a sample obtained from the subject, and wherein the inhibitor of TL1A activity or expression comprises a antibody or antigen-binding fragment that specifically binds to a tumor necrosis factor-like protein 1A (TL1A) polypeptide, comprising a heavy chain variable framework region comprising a human IGHV1-46*02 framework or a modified human IGHV1-46*02 framework, and a light chain variable framework region comprising a human IGKV3-20 framework or a modified human IGKV3-20 framework; wherein the heavy chain variable framework region and the light chain variable framework region collectively comprise less than about 14 amino acid modifications from the human IGHV1-46*02 framework and the human IGKV3-20 framework.
[1480] 192. A method of treating an inflammatory, a fibrotic, or a fibrostenotic disease or condition in a subject, the method comprising administering to the subject a therapeutically effective amount of an inhibitor of Tumor necrosis factor-like cytokine 1A (TL1A) activity or expression,
[1481] wherein at least eight polymorphisms that are predictive of a positive therapeutic response in the subject to a treatment with the inhibitor of TL1A activity or expression with a positive predictive value or a specificity of at least about 51%, are detected in a sample obtained from the subject, and wherein the inhibitor of TL1A activity or expression comprises a antibody or antigen-binding fragment that specifically binds to a tumor necrosis factor-like protein 1A (TL1A) polypeptide, comprising a heavy chain variable framework region comprising a human IGHV1-46*02 framework or a modified human IGHV1-46*02 framework, and a light chain variable framework region comprising a human IGKV3-20 framework or a modified human IGKV3-20 framework; wherein the heavy chain variable framework region and the light chain variable framework region collectively comprise less than about 14 amino acid modifications from the human IGHV1-46*02 framework and the human IGKV3-20 framework.
[1482] 193. The method of embodiment 193 or 194, wherein the heavy chain variable framework region and the light chain variable framework region collectively comprise 13, 12, 11, 10, 9, 8, 7, 6, 5, 4, 3, 2, 1, or no amino acid modifications from the human IGHV1-46*02 framework and the human IGKV3-20 framework.
[1483] 194. The method of any one of embodiments 170-193, wherein the antibody is humanized.
[1484] 195. The method of any one of embodiments 170-194, wherein the antibody comprises a human IgG1 fragment crystallizable (Fc) region.
[1485] 196. The method of any one of embodiments 170-194, wherein the antibody comprises a human IgG4 fragment crystallizable (Fc) region.
[1486] 197. The method of embodiments 170-197, wherein the disease or condition comprises inflammatory bowel disease.
[1487] 198. The method of embodiments 170-198, wherein the disease or condition comprises Crohn's disease.
[1488] 199. The method of embodiments 170-199, wherein the disease or condition comprises ulcerative colitis.
[1489] 200. The method of any one of embodiments 170-200, further comprising predicting a positive therapeutic response in a subject to a treatment with the inhibitor of TL1A activity or expression with a positive predictive value of at least or about 50%, 55%, 60%, 65%, 70%, 75%, 80%, 85%, 90%, 91%, 92%, 93%, 94%95% 96% 97%, 98%, 99%, or 100%.
[1490] 201. The method of any one of embodiments 169-201, further comprising predicting a positive therapeutic response in a subject to a treatment with the inhibitor of TL1A activity or expression with a specificity of at least or about 50%, 55%, 60%, 65%, 70%, 75%, 80%, 85%, 90%, 91%, 92%, 93%, 94%95% 96% 97% 98% 99% or 100%.
[1491] 202. The method of any one of embodiments, 162-201, inflammatory, fibrotic, or fibrostenotic disease or condition comprises inflammatory bowel disease, Crohn's disease, obstructive Crohn's disease, ulcerative colitis, intestinal fibrosis, intestinal fibrostenosis, rheumatoid arthritis, pulmonary fibrosis (e.g., idiopathic pulmonary fibrosis), scleroderma, or primary sclerosing cholangitis.

[1492] In some embodiments, the at least three polymorphisms is eight polymorphisms. Non-limiting examples of eight polymorphism combinations are provided in paragraph [045], embodiment 54 (495 combinations).

### Kits

[1493] Further provided is a kit to treat IBD (e.g., CD, UC and/or mrUC). The kit comprises of the antibodies described herein, which can be used to perform the methods described herein. The kit is useful for practicing the inventive method of providing treatment to an IBD, CD, UC and/or mrUC patient by administering an anti-TL1A antibody. The kit is an assemblage of materials or components, including at least one of the inventive compositions. Thus, in some embodiments, the kit contains a composition including anti-TL1A antibodies, for the treatment of IBD, CD, UC and/or MR-UC, as described above. In other embodiments, the kits contain all of the components necessary and/or sufficient to perform a detection assay for TL1A, including all controls, directions for performing assays, and any necessary software for analysis and presentation of results.

[1494] The exact nature of the components configured in the inventive kit depends on its intended purpose. For example, some embodiments are configured for the purpose of treating IBD, CD, UC and/or MR-UC. In one embodiment, the kit is configured particularly for the purpose of treating mammalian subjects. In another embodiment, the kit is configured particularly for the purpose of treating human subjects. In further embodiments, the kit is configured for veterinary applications, treating subjects such as, but not limited to, farm animals, domestic animals, and laboratory animals.

[1495] Instructions for use may be included in the kit. “Instructions for use” typically include a tangible expression describing the technique to be employed in using the components of the kit to effect a desired outcome, such as to treat or alleviate IBD, CD, UC and/or MR-UC. Optionally, the kit also contains other useful components, such as, diluents, buffers, pharmaceutically acceptable carriers, syringes, catheters, applicators, pipetting or measuring tools, bandaging materials or other useful paraphernalia as will be readily recognized by those of skill in the art.

[1496] The materials or components assembled in the kit can be provided to the practitioner stored in any convenient and suitable ways that preserve their operability and utility. For example, the components can be in dissolved, dehydrated, or lyophilized form; they can be provided at room, refrigerated or frozen temperatures. The components are typically contained in suitable packaging material(s). As employed herein, the phrase “packaging material” refers to one or more physical structures used to house the contents of the kit, such as inventive compositions and the like. The packaging material is constructed by well-known methods, preferably to provide a sterile, contaminant-free environment. The packaging materials employed in the kit are those customarily utilized in gene expression assays and in the administration of treatments. As used herein, the term “package” refers to a suitable solid matrix or material such as glass, plastic, paper, foil, and the like, capable of holding the individual kit components. Thus, for example, a package can be a glass vial or prefilled syringes used to contain suitable quantities of an inventive composition containing anti-TL1A antibodies and/or primers and probes for TL1A. The packaging material generally has an external label which indicates the contents and/or purpose of the kit and/or its components.

[1497] Disclosed herein, are kits useful for to detect the genotypes and/or biomarkers disclosed herein. In some embodiments, the kits disclosed herein may be used to diagnose and/or treat a disease or condition in a subject; or select a patient for treatment and/or monitor a treatment disclosed herein. In some embodiments, the kit comprises the compositions described herein, which can be used to perform the methods described herein. Kits comprise an assemblage of materials or components, including at least one of the compositions. Thus, in some embodiments the kit contains a composition including of the pharmaceutical composition, for the treatment of IBD. In other embodiments, the kits contains all of the components necessary and/or sufficient to perform an assay for detecting and measuring IBD markers, including all controls, directions for performing assays, and any necessary software for analysis and presentation of results.

[1498] In some instances, the kits described herein comprise components for detecting the presence, absence, and/or quantity of a target nucleic acid and/or protein described herein. In some embodiments, the kit further comprises components for detecting the presence, absence, and/or quantity of a serological marker described herein. In some embodiments, the kit comprises the compositions (e.g., primers, probes, antibodies) described herein. The disclosure provides kits suitable for assays such as enzyme-linked immunosorbent assay (ELISA), single-molecular array (Simoa), PCR, and qPCR. The exact nature of the components configured in the kit depends on its intended purpose.

[1499] In some embodiments, the kits described herein are configured for the purpose of treating and/or characterizing a disease or condition (e.g., Crohn's disease, pulmonary fibrosis, scleroderma, ulcerative colitis), or subclinical phenotype thereof (e.g., stricturing, penetrating, or stricturing and penetrating disease phenotypes) in a subject. In some embodiments, the kits described herein are configured for the purpose of identifying a subject suitable for treatment with an inhibitor of TL1A activity or expression (e.g., anti-TL1A antibody). In some embodiments, the kit is configured particularly for the purpose of treating mammalian subjects. In some embodiments, the kit is configured particularly for the purpose of treating human subjects. In further embodiments, the kit is configured for veterinary applications, treating subjects such as, but not limited to, farm animals, domestic animals, and laboratory animals. In some embodiments, the kit is configured to select a subject for a therapeutic agent, such as those disclosed herein. In some embodiments, the kit is configured to select a subject for treatment with a therapeutic agent disclosed herein. An exemplary therapeutic agent is an anti-TL1A antibody.

[1500] Instructions for use may be included in the kit. Optionally, the kit also contains other useful components, such as, diluents, buffers, pharmaceutically acceptable carriers, syringes, catheters, applicators, pipetting or measuring tools, bandaging materials or other useful paraphernalia. The materials or components assembled in the kit can be provided to the practitioner stored in any convenient and suitable ways that preserve their operability and utility. For example the components can be in dissolved, dehydrated, or lyophilized form; they can be provided at room, refrigerated or frozen temperatures. The components are typically contained in suitable packaging material(s). As employed herein, the phrase “packaging material” refers to one or more physical structures used to house the contents of the kit, such as compositions and the like. The packaging material is constructed by well-known methods, preferably to provide a sterile, contaminant-free environment. The packaging materials employed in the kit are those customarily utilized in gene expression assays and in the administration of treatments. As used herein, the term “package” refers to a suitable solid matrix or material such as glass, plastic, paper, foil, and the like, capable of holding the individual kit components. Thus, for example, a package can be a glass vial or prefilled syringes used to contain suitable quantities of the pharmaceutical composition. The packaging material has an external label which indicates the contents and/or purpose of the kit and its components.

### Systems

[1501] Disclosed herein are systems for treating a subject with an inhibitor of TL1A activity or expression (e.g., anti-TL1A antibody), wherein at least three polymorphisms that are predictive of a positive therapeutic response in the subject to a treatment with the inhibitor of TL1A activity or expression with a positive predictive value or a specificity of at least about 51%, are detected in a sample obtained from the subject. In some embodiments, the systems described herein comprise kits and compositions for detecting the genotypes described herein in a biological sample of a subject. The system may comprise a computer system for implementing one or more methods of the disclosure, such as for example, receiving genotype data of a subject 201, inputting the genotype data into an algorithm to produce a TNFSF15 profile 202, and generating a report comprising the TNFSF15 profile of the subject 203, and displaying the report to a user on a graphical user interface 204, as shown in FIG. 2. A “TNFSF15 profile” as used herein refers to a profile of one or more genotypes described herein of a subject that is detected in a biological sample obtained from the subject. In some embodiments, a TNFSF15 profile comprises a positive, a negative, or an indeterminate result (e.g., therapeutic response to treatment with an inhibitor of TL1A activity or expression).

### Computer Systems

[1502] FIG. 3 shows a computer system 301 that is programmed or otherwise configured to generate a TNFSF15 profile for a subject in need thereof. The computer system 301 can regulate various aspects of producing the TNFSF15 profile (e.g., receiving genotype data, generating a report with the TNFSF15 profile of the biological sample, and displaying the report to a user), of the present disclosure, such as, for example, by including permissions or encryption of genotype data and/or TNFSF15 profile of the subject to ensure patient privacy.

[1503] The computer system 301 can be an electronic device of a user or a computer system that is remotely located with respect to the electronic device. The electronic device can be a mobile electronic device, such as a mobile electronic device belonging to a physician.

[1504] The computer system 301 includes a central processing unit (CPU, also “processor” and “computer processor” herein) 305, which can be a single core or multi core processor, or a plurality of processors for parallel processing. The computer system 301 also includes memory or memory location 310 (e.g., random-access memory, read-only memory, flash memory), electronic storage unit 315 (e.g., hard disk), communication interface 320 (e.g., network adapter) for communicating with one or more other systems, and peripheral devices 325, such as cache, other memory, data storage and/or electronic display adapters. The memory 310, storage unit 315, interface 320 and peripheral devices 325 are in communication with the CPU 305 through a communication bus (solid lines), such as a motherboard. The storage unit 315 can be a data storage unit (or data repository) for storing data. The computer system 301 can be operatively coupled to a computer network (“network”) 330 with the aid of the communication interface 320. The network 330 can be the Internet, an internet and/or extranet, or an intranet and/or extranet that is in communication with the Internet. The network 330 in some cases is a telecommunication and/or data network. The network 330 can include one or more computer servers, which can enable distributed computing, such as cloud computing. The network 330, in some cases with the aid of the computer system 301, can implement a peer-to-peer network, which may enable devices coupled to the computer system 301 to behave as a client or a server.

[1505] The CPU 305 can execute a sequence of machine-readable instructions, which can be embodied in a program or software. The instructions may be stored in a memory location, such as the memory 310. The instructions can be directed to the CPU 305, which can subsequently program or otherwise configure the CPU 305 to implement methods of the present disclosure. Examples of operations performed by the CPU 305 can include fetch, decode, execute, and writeback.

[1506] The CPU 305 can be part of a circuit, such as an integrated circuit. One or more other components of the system 301 can be included in the circuit. In some cases, the circuit is an application specific integrated circuit (ASIC).

[1507] The storage unit 315 can store files, such as drivers, libraries and saved programs. The storage unit 315 can store user data, e.g., user preferences and user programs. The computer system 301 in some cases can include one or more additional data storage units that are external to the computer system 301, such as located on a remote server that is in communication with the computer system 301 through an intranet or the Internet.

[1508] The computer system 301 can communicate with one or more remote computer systems through the network 330. For instance, the computer system 301 can communicate with a remote computer system of a user. Examples of remote computer systems include personal computers (e.g., portable PC), slate or tablet PC's (e.g., Apple® iPad, Samsung® Galaxy Tab), telephones, Smart phones (e.g., Apple® iPhone, Android-enabled device, Blackberry®), or personal digital assistants. The user can access the computer system 301 via the network 330.

[1509] Methods as described herein can be implemented by way of machine (e.g., computer processor) executable code stored on an electronic storage location of the computer system 301, such as, for example, on the memory 310 or electronic storage unit 315. The machine executable or machine readable code can be provided in the form of software. During use, the code can be executed by the processor 305. In some cases, the code can b e retrieved from the storage unit 315 and stored on the memory 310 for ready access by the processor 305. In some situations, the electronic storage unit 315 can be precluded, and machine-executable instructions are stored on memory 310.

[1510] The code can be pre-compiled and configured for use with a machine having a processer adapted to execute the code, or can be compiled during runtime. The code can be supplied in a programming language that can be selected to enable the code to execute in a pre-compiled or as-compiled fashion.

[1511] Aspects of the systems and methods provided herein, such as the computer system 301, can be embodied in programming. Various aspects of the technology may be thought of as “products” or “articles of manufacture” typically in the form of machine (or processor) executable code and/or associated data that is carried on or embodied in a type of machine readable medium. Machine-executable code can be stored on an electronic storage unit, such as memory (e.g., read-only memory, random-access memory, flash memory) or a hard disk. “Storage” type media can include any or all of the tangible memory of the computers, processors or the like, or associated modules thereof, such as various semiconductor memories, tape drives, disk drives and the like, which may provide non-transitory storage at any time for the software programming. All or portions of the software may at times be communicated through the Internet or various other telecommunication networks. Such communications, for example, may enable loading of the software from one computer or processor into another, for example, from a management server or host computer into the computer platform of an application server. Thus, another type of media that may bear the software elements includes optical, electrical and electromagnetic waves, such as used across physical interfaces between local devices, through wired and optical landline networks and over various air-links. The physical elements that carry such waves, such as wired or wireless links, optical links or the like, also may be considered as media bearing the software. As used herein, unless restricted to non-transitory, tangible “storage” media, terms such as computer or machine “readable medium” refer to any medium that participates in providing instructions to a processor for execution.

[1512] Hence, a machine readable medium, such as computer-executable code, may take many forms, including but not limited to, a tangible storage medium, a carrier wave medium or physical transmission medium. Non-volatile storage media include, for example, optical or magnetic disks, such as any of the storage devices in any computer(s) or the like, such as may be used to implement the databases, etc. shown in the drawings. Volatile storage media include dynamic memory, such as main memory of such a computer platform. Tangible transmission media include coaxial cables; copper wire and fiber optics, including the wires that comprise a bus within a computer system. Carrier-wave transmission media may take the form of electric or electromagnetic signals, or acoustic or light waves such as those generated during radio frequency (RF) and infrared (IR) data communications. Common forms of computer-readable media therefore include for example: a floppy disk, a flexible disk, hard disk, magnetic tape, any other magnetic medium, a CD-ROM, DVD or DVD-ROM, any other optical medium, punch cards paper tape, any other physical storage medium with patterns of holes, a RAM, a ROM, a PROM and EPROM, a FLASH-EPROM, any other memory chip or cartridge, a carrier wave transporting data or instructions, cables or links transporting such a carrier wave, or any other medium from which a computer may read programming code and/or data. Many of these forms of computer readable media may be involved in carrying one or more sequences of one or more instructions to a processor for execution.

[1513] The computer system 301 can include or be in communication with an electronic display 335 that comprises a user interface (UI) 340 for providing, for example, a report comprising the TNFSF15 profile of the subject or other relevant clinical information for purposes of informing a selection of a therapeutic agent (e.g., anti-TL1A antibody) to treat a disease or condition of the subject described herein. Examples of UI's include, without limitation, a graphical user interface (GUI) and web-based user interface.

[1514] Methods and systems of the present disclosure can be implemented by way of one or more algorithms. An algorithm can be implemented by way of software upon execution by the central processing unit 305. The algorithm can, for example, perform: (a) receiving genotype data of a subject 401, (b) determining whether the genotypes are heterozygous or homozygous for at least three polymorphisms 402, (c) generating an outcome using predetermined parameters 403, and (d) displaying the outcome to a user (e.g., physician) on a user interface of an electronic device 404, as shown in FIG. 4. In some embodiments, the outcome is positive, negative or indeterminant. In some embodiments, the predetermined parameters are genotype combinations known to be predictive of a therapeutic response to a treatment, such as with an inhibitor of TL1A activity or expression.

### Web Application

[1515] In some embodiments, the computer system comprises software for a web application. In light of the disclosure provided herein, those of skill in the art will recognize that a web application may utilize one or more software frameworks and one or more database systems. A web application, for example, is created upon a software framework such as Microsoft®.NET or Ruby on Rails (RoR). A web application, in some instances, utilizes one or more database systems including, by way of non-limiting examples, relational, non-relational, feature oriented, associative, and XML database systems. Suitable relational database systems include, by way of non-limiting examples, Microsoft® SQL Server, my SQL™, and Oracle®. Those of skill in the art will also recognize that a web application may be written in one or more versions of one or more languages. In some embodiments, a web application is written in one or more markup languages, presentation definition languages, client-side scripting languages, server-side coding languages, database query languages, or combinations thereof. In some embodiments, a web application is written to some extent in a markup language such as Hypertext Markup Language (HTML), Extensible Hypertext Markup Language (XHTML), or eXtensible Markup Language (XML). In some embodiments, a web application is written to some extent in a presentation definition language such as Cascading Style Sheets (CSS). In some embodiments, a web application is written to some extent in a client-side scripting language such as Asynchronous Javascript and XML (AJAX), Flash® Actionscript, Javascript, or Silverlight®. In some embodiments, a web application is written to some extent in a server-side coding language such as Active Server Pages (ASP), ColdFusion®, Perl, Java™, JavaServer Pages (JSP), Hypertext Preprocessor (PHP), Python™, Ruby, Tcl, Smalltalk, WebDNA®, or Groovy. In some embodiments, a web application is written to some extent in a database query language such as Structured Query Language (SQL). A web application may integrate enterprise server products such as IBM® Lotus Domino®. A web application may include a media player element. A media player element may utilize one or more of many suitable multimedia technologies including, by way of non-limiting examples, Adobe® Flash®, HTML 5, Apple® QuickTime®, Microsoft® Silverlight®, Java™, and Unity®.

### Mobile Application

[1516] In some embodiments, the computer system comprises software for a mobile application. The mobile application may be provided to a mobile digital processing device at the time tt is manufactured. The mobile application may be provided to a mobile digital processing device via the computer network described herein.

[1517] A mobile application is created by techniques known to those of skill in the art using hardware, languages, and development environments known to the art. Those of skill in the art will recognize that mobile applications may be written in several languages. Suitable programming languages include, by way of non-limiting examples, C, C++, C #, Featureive-C, Java™, Javascript, Pascal, Feature Pascal, Python™, Ruby, VB.NET, WML, and XHTML/HTML with or without CSS, or combinations thereof.

[1518] Suitable mobile application development environments are available from several sources. Commercially available development environments include, by way of non-limiting examples, Airplay SDK, alcheMo, Appcelerator®, Celsius, Bedrock, Flash Lite, .NET Compact Framework, Rhomobile, and WorkLight Mobile Platform. Other development environments may be available without cost including, by way of non-limiting examples, Lazarus, MobiFlex, MoSync, and Phonegap. Also, mobile device manufacturers distribute software developer kits including, by way of non-limiting examples, iPhone and iPad (iOS) SDK, Android™ SDK, BlackBerry® SDK, BREW SDK, Palm® OS SDK, Symbian SDK, webOS SDK, and Windows® Mobile SDK.

[1519] Those of skill in the art will recognize that several commercial forums are available for distribution of mobile applications including, by way of non-limiting examples, Apple® App Store, Android™ Market, BlackBerry® App World, App Store for Palm devices, App Catalog for webOS, Windows® Marketplace for Mobile, Ovi Store for Nokia® devices, Samsung® Apps, and Nintendo® DSi Shop.

### Standalone Application

[1520] In some embodiments, the computer system comprises software a standalone application, which is a program that may be run as an independent computer process, not an add-on to an existing process, e.g., not a plug-in. Those of skill in the art will recognize that standalone applications are sometimes compiled. In some instances, a compiler is a computer program(s) that transforms source code written in a programming language into binary feature code such as assembly language or machine code. Suitable compiled programming languages include, by way of non-limiting examples, C, C++, Featureive-C, COBOL, Delphi, Eiffel, Java™, Lisp, Python™, Visual Basic, and VB .NET, or combinations thereof. Compilation may be often performed, at least in part, to create an executable program. In some instances, a computer program includes one or more executable complied applications.

### Web Browser Plug-In

[1521] In some embodiments, the computer system comprises software that comprises a web browser plug-in. In computing, a plug-in, in some instances, is one or more software components that add specific functionality to a larger software application. Makers of software applications may support plug-ins to enable third-party developers to create abilities which extend an application, to support easily adding new features, and to reduce the size of an application. When supported, plug-ins enable customizing the functionality of a software application. For example, plug-ins are commonly used in web browsers to play video, generate interactivity, scan for viruses, and display particular file types. Those of skill in the art will be familiar with several web browser plug-ins including, Adobe® Flash® Player, Microsoft® Silverlight®, and Apple® QuickTime®. The toolbar may comprise one or more web browser extensions, add-ins, or add-ons. The toolbar may comprise one or more explorer bars, tool bands, or desk bands.

[1522] In view of the disclosure provided herein, those of skill in the art will recognize that several plug-in frameworks are available that enable development of plug-ins in various programming languages, including, by way of non-limiting examples, C++, Delphi, Java™, PHP, Python™, and VB .NET, or combinations thereof.

[1523] In some embodiments, Web browsers (also called Internet browsers) are software applications, designed for use with network-connected digital processing devices, for retrieving, presenting, and traversing information resources on the World Wide Web. Suitable web browsers include, by way of non-limiting examples, Microsoft® Internet Explorer®, Mozilla® Firefox®, Google® Chrome, Apple® Safari®, Opera Software® Opera®, and KDE Konqueror. The web browser, in some instances, is a mobile web browser. Mobile web browsers (also called microbrowsers, mini-browsers, and wireless browsers) may be designed for use on mobile digital processing devices including, by way of non-limiting examples, handheld computers, tablet computers, netbook computers, subnotebook computers, smartphones, music players, personal digital assistants (PDAs), and handheld video game systems. Suitable mobile web browsers include, by way of non-limiting examples, Google® Android® browser, RIM BlackBerry® Browser, Apple® Safari®, Palm® Blazer, Palm® Web OS® Browser, Mozilla® Firefox® for mobile, Microsoft® Internet Explorer® Mobile, Amazon® Kindle® Basic Web, Nokia® Browser, Opera Software® Opera® Mobile, and Sony® PSP™ browser.

### Software Modules

[1524] The medium, method, and system disclosed herein comprise one or more softwares, servers, and database modules, or use of the same. In view of the disclosure provided herein, software modules may be created by techniques known to those of skill in the art using machines, software, and languages known to the art. The software modules disclosed herein may be implemented in a multitude of ways. In some embodiments, a software module comprises a file, a section of code, a programming feature, a programming structure, or combinations thereof. A software module may comprise a plurality of files, a plurality of sections of code, a plurality of programming features, a plurality of programming structures, or combinations thereof. By way of non-limiting examples, the one or more software modules comprise a web application, a mobile application, and/or a standalone application. Software modules may be in one computer program or application. Software modules may be in more than one computer program or application. Software modules may be hosted on one machine. Software modules may be hosted on more than one machine. Software modules may be hosted on cloud computing platforms. Software modules may be hosted on one or more machines in one location. Software modules may be hosted on one or more machines in more than one location.

### Databases

[1525] The medium, method, and system disclosed herein comprise one or more databases, or use of the same. In view of the disclosure provided herein, those of skill in the art will recognize that many databases are suitable for storage and retrieval of geologic profile, operator activities, division of interest, and/or contact information of royalty owners. Suitable databases include, by way of non-limiting examples, relational databases, non-relational databases, feature oriented databases, feature databases, entity-relationship model databases, associative databases, and XML databases. In some embodiments, a database is internet-based. In some embodiments, a database is web-based. In some embodiments, a database is cloud computing-based. A database may be based on one or more local computer storage devices.

### Data Transmission

[1526] The subject matter described herein, including methods for producing a TNFSF15 profile are configured to be performed in one or more facilities at one or more locations. Facility locations are not limited by country and include any country or territory. In some instances, one or more steps are performed in a different country than another step of the method. In some instances, one or more steps for obtaining a sample are performed in a different country than one or more steps for detecting the presence or absence of a genotype in a biological sample. In some embodiments, one or more method steps involving a computer system are performed in a different country than another step of the methods provided herein. In some embodiments, data processing and analyses are performed in a different country or location than one or more steps of the methods described herein. In some embodiments, one or more articles, products, or data are transferred from one or more of the facilities to one or more different facilities for analysis or further analysis. An article includes, but is not limited to, one or more components obtained from a subject, e.g., processed cellular material. Processed cellular material includes, but is not limited to, cDNA reverse transcribed from RNA, amplified RNA, amplified cDNA, sequenced DNA, isolated and/or purified RNA, isolated and/or purified DNA, and isolated and/or purified polypeptide. Data includes, but is not limited to, information regarding the stratification of a subject, and any data produced by the methods disclosed herein. In some embodiments of the methods and systems described herein, the analysis is performed and a subsequent data transmission step will convey or transmit the results of the analysis.

[1527] In some embodiments, any step of any method described herein is performed by a software program or module on a computer. In additional or further embodiments, data from any step of any method described herein is transferred to and from facilities located within the same or different countries, including analysis performed in one facility in a particular location and the data shipped to another location or directly to an individual in the same or a different country. In additional or further embodiments, data from any step of any method described herein is transferred to and/or received from a facility located within the same or different countries, including analysis of a data input, such as genetic or processed cellular material, performed in one facility in a particular location and corresponding data transmitted to another location, or directly to an individual, such as data related to the diagnosis, prognosis, responsiveness to therapy (e.g., anti-TL1A therapy), or the like, in the same or different location or country.

### Business Methods Utilizing a Computer

[1528] The methods described herein may utilize one or more computers. The computer may be used for managing customer and biological sample information such as sample or customer tracking, database management, analyzing molecular profiling data, analyzing cytological data, storing data, billing, marketing, reporting results, storing results, or a combination thereof. The computer may include a monitor or other user interface for displaying data, results, billing information, marketing information (e.g. demographics), customer information, or sample information. The computer may also include means for data or information input. The computer may include a processing unit and fixed or removable media or a combination thereof. The computer may be accessed by a user in physical proximity to the computer, for example via a keyboard and/or mouse, or by a user that does not necessarily have access to the physical computer through a communication medium such as a modem, an internet connection, a telephone connection, or a wired or wireless communication signal carrier wave. In some cases, the computer may be connected to a server or other communication device for relaying information from a user to the computer or from the computer to a user. In some cases, the user may store data or information obtained from the computer through a communication medium on media, such as removable media. It is envisioned that data relating to the methods can be transmitted over such networks or connections for reception and/or review by a party. The receiving party can be but is not limited to an individual, a health care provider (e.g., physician) or a health care manager. In one embodiment, a computer-readable medium includes a medium suitable for transmission of a result of an analysis of a biological sample, such as exosome bio-signatures. The medium can include a result regarding an exosome bio-signature of a subject, wherein such a result is derived using the methods described herein.

[1529] The entity obtaining a report with the TNFSF15 profile may enter biological sample information into a database for the purpose of one or more of the following: inventory tracking, assay result tracking, order tracking, customer management, customer service, billing, and sales. Sample information may include, but is not limited to: customer name, unique customer identification, customer associated medical professional, indicated assay or assays, assay results, adequacy status, indicated adequacy tests, medical history of the individual, preliminary diagnosis, suspected diagnosis, sample history, insurance provider, medical provider, third party testing center or any information suitable for storage in a database. Sample history may include but is not limited to: age of the sample, type of sample, method of acquisition, method of storage, or method of transport.

[1530] The database may be accessible by a customer, medical professional, insurance provider, or other third party. Database access may take the form of electronic communication such as a computer or telephone. The database may be accessed through an intermediary such as a customer service representative, business representative, consultant, independent testing center, or medical professional. The availability or degree of database access or sample information, such as assay results, may change upon payment of a fee for products and services rendered or to be rendered. The degree of database access or sample information may be restricted to comply with generally accepted or legal requirements for patient or customer confidentiality.

### Systems Embodiments

[1531] Among the exemplary embodiments are:
[1532] 1. A computer system for evaluating a sample from a subject, the system comprising:
   [1533] a) a central computing environment;
   [1534] b) an input device operatively connected to said central computing environment, wherein said input device is configured to receive a presence or absence of a genotype that correlates with a disease state in the sample;
   [1535] c) an algorithm executed by said central computing environment, wherein the algorithm is configured to use the presence or absence of the genotype to classify said sample as at least one of (i) a disease or normal sample, and (ii) a response or a non-response to an anti-TL1A therapy; and
   [1536] d) an output device operatively connected to said central computing environment, wherein said output device is configured to provide information on the classification to a user.
[1537] 2. The computer system of embodiment 1, wherein the disease state comprises at least one of an inflammatory, a fibrostenotic, and a fibrotic, disease or condition.
[1538] 3. The computer system of embodiment 1 or embodiment 2, wherein the disease state is a TL1A mediated disease state selected from the group consisting of inflammatory bowel disease (IBD), Crohn's disease (CD), obstructive CD, ulcerative colitis (UC), intestinal fibrosis, intestinal fibrostenosis, rheumatoid arthritis, and primary sclerosing cholangitis.
[1539] 4. The computer system of any previous embodiment, herein the sample comprises whole blood, plasma, serum, or tissue.
[1540] 5. The computer system of any previous embodiment, wherein the genotype comprises at least one polymorphism selected from Table 1 or Table 4, a polymorphism in linkage disequilibrium (LD) therewith, and any combination thereof.
[1541] 6. The computer system of any previous embodiment, wherein the genotype comprises at least one polymorphism comprising a non-reference allele.
[1542] 7. The computer system of any previous embodiment, wherein the genotype comprises at least two polymorphisms provided in Table 1 or Table 4.
[1543] 8. The computer system of any previous embodiment, wherein the genotype comprises at least three polymorphisms provided in Table 1 or Table 4.
[1544] 9. The computer system of any previous embodiment, wherein the genotype comprises at least four polymorphisms provided in Table 1 or Table 4.
[1545] 10. The computer system of any previous embodiment, wherein the genotype comprises at least five polymorphisms provided in Table 1 or Table 4.
[1546] 11. The computer system of any previous embodiment, wherein the genotype comprises at least six polymorphisms provided in Table 1 or Table 4.
[1547] 12. The computer system of any previous embodiment, wherein the genotype comprises at least seven polymorphisms provided in Table 1 or Table 4.
[1548] 13. The computer system of any previous embodiment, wherein the genotype comprises at least eight polymorphisms provided in Table 1 or Table 4.
[1549] 14. The computer system of any previous embodiment, further comprising the genotype is homozygous.
[1550] 15. The computer system of embodiment 5-13, where LD is defined by an r² value of at least 0.80, 0.85, 0.90, 0.95, or 1.0.
[1551] 16. The computer system of any previous embodiment, wherein the genotype is associated with a risk that a subject has, or will develop, the disease state by a P value of at most about 1.0×10⁻⁶, about 1.0×10⁻⁷, about 1.0×10⁻⁸, about 1.0×10⁻⁹, about 1.0×10¹⁰ about 1.0×10⁻²⁰, about 1.0×10⁻³⁰, about 1.0×10⁻⁴°, about 1.0×10⁻⁵°, about 1.0×10⁻⁶⁰ about 1.0×10⁻⁷⁰, about 1.0×10⁻⁸⁰, about 1.0×10⁻⁹⁰, or about 1.0×10⁻¹⁰⁰.
[1552] 17. The computer system of any previous embodiment, wherein said output device provides a report summarizing said information on said classification.
[1553] 18. The computer system of any previous embodiment, wherein said report comprises a recommendation for treatment of said disease state.
[1554] 19. The computer system of embodiment 18, wherein the treatment comprises administration of an inhibitor of TL1A activity or expression.
[1555] 20. The computer system of embodiment 19, wherein the inhibitor of TL1A activity or expression comprises an antibody or antigen-binding fragment, peptide, or small molecule.
[1556] 21. The computer system of any preceding embodiment, wherein said genotype is determined with an assay comprising polymerase chain reaction (PCR), quantitative reverse-transcription PCR (qPCR), automated sequencing, genotype array, or a combination thereof.
[1557] 22. Use of a composition comprising one or more binding agents for generating a report that classifies a sample from a subject as at least one of (i) a disease or non-disease state and (ii) a response or a non-response to an anti-TL1A therapy, wherein the one or more binding agents specifically bind to a risk allele provided in Table 1 corresponding to a polymorphism provided in Table 1, their compliment, a polymorphism in linkage disequilibrium therewith, and any combination thereof.
[1558] 23. The use of embodiment 22, wherein generating the report further comprises:
   [1559] a) providing the sample from the subject;
   [1560] b) assaying the sample from the subject for detecting the presence of a polymorphism provided in Table 1;
   [1561] c) generating the report based on the result of step (b); and
   [1562] d) determining whether said subject has or is likely to exhibit a positive therapeutic response to a treatment with an inhibitor of TL1A activity or expression based on the results of step (b).
[1563] 24. The use of embodiment 22 or 23, wherein the disease state comprises at least one of an inflammatory, a fibrostenotic, and a fibrotic, disease or condition.
[1564] 25. The use of embodiment 22-24, wherein the disease state is a TL1A-mediated disease state selected from the group consisting of inflammatory bowel disease (IBD), Crohn's disease (CD), obstructive CD, ulcerative colitis (UC), intestinal fibrosis, intestinal fibrostenosis, scleroderma, pulmonary fibrosis (e.g., idiopathic pulmonary fibrosis) and primary sclerosing cholangitis.
[1565] 26. The use of any of embodiments 22-25, wherein the sample comprises whole blood, plasma, serum, or tissue.
[1566] 27. The use of embodiment 23, wherein assaying the sample from the subject for detecting the presence of the risk allele corresponding to the polymorphism provided in Table 1 of step (b) comprises:
   [1567] a) contacting the sample with the one or more binding agents that specifically bind to at least 10 contiguous nucleobases that includes the risk allele provided in any one of SEQ ID NOS: 2001-2041, or 2057-2059; and
   [1568] b) determining whether the sample specifically binds to said one or more binding agents, wherein binding of the sample to the one or more binding agents indicates the presence of the polymorphism in the subject.
[1569] 28. The use of embodiment 23, wherein assaying the sample from the subject for detecting the presence of the risk allele corresponding to the polymorphism provided in Table 1 of step (b) comprises sequencing of the sample.
[1570] 29. The use of embodiment 23, wherein assaying the sample from the subject for detecting the presence of the one or more polymorphisms of step (b) comprises quantifying the amount of DNA comprising the risk allele.
[1571] 30. The use of embodiment 29, wherein the quantifying comprises PCR.
[1572] 31. The use of embodiment 30, wherein the PCR comprises real-time PCR.
[1573] 32. The use of embodiment 29, wherein the quantifying comprises hybridization.
[1574] 33. A composition comprising one or more binding agents that specifically bind to a risk allele corresponding to a polymorphism provided in Table 1, wherein the one or more binding agents are selected to classify a sample as at least one of (i) a disease or non-disease or a disease state and (ii) a response or a non-response to an anti-TL1A therapy.
[1575] 34. The composition of embodiment 33, wherein the one or more binding agents comprise oligonucleotides.
[1576] 35. The composition of embodiment 34, wherein the oligonucleotides comprise RNA or DNA.
[1577] 36. The composition of embodiment 34, wherein the one or more binding agents comprise aptamers, antibodies, peptide nucleic acids, or pyranosyl RNA.
[1578] 37. A kit for detecting at least one of an inflammatory, a fibrostenotic, and a fibrotic, disease or condition in a subject, the kit comprising:
   [1579] a) at least one binding agent that specifically binds to at least 10 contiguous nucleic acid molecules provided in any one of SEQ ID NOS: 2001-2041, or 2057-2059 including a corresponding risk allele provided in Table 1, or their complement, wherein the at least one binding agent is selected to detect at least one of (i) a disease or non-disease state and (ii) a response or a non-response to an anti-TL1A therapy; and
   [1580] b) reagents for detecting binding of said at least one binding agent to a DNA sample from a subject.
[1581] 38. The kit of embodiment 37, wherein the at least one binding agent comprises at least one oligonucleotide.
[1582] 39. The kit of embodiment 37, wherein the at least one binding agent comprises at least one aptamer, antibody, peptide nucleic acid, or pyranosyl RNA.
[1583] 40. The kit of embodiment 37-39, wherein the at least one binding agent is labelled with a detectable label.
[1584] 41. The kit of embodiment 37-40, wherein the at least one binding agent is immobilized to a surface.
[1585] 42. A system for generating a report that classifies a sample a disease or non-disease of a disease state, comprising:
   [1586] a) a computer system that:
      [1587] i. generates a molecular profile of a DNA sample based upon the presence of at least one polymorphism, or their complement; and
      [1588] ii. generates a report that classifies the sample based on said molecular profile; and
   [1589] b) a computer screen that displays said report.
[1590] 43. The system of embodiment 42, wherein the presence of the at least one polymorphism is based on the result of an assay of said DNA sample, which result is entered into a database.
[1591] 44. The system of embodiment 42-43, further comprising an input for said result.
[1592] 45. The system of claims 42-44, wherein the at least one polymorphism is selected from Table 1.
[1593] 46. The system of claims 42-45, wherein the at least one polymorphism comprises a non-reference allele.
[1594] 47. The system of claim 46, wherein the at least one polymorphism is two polymorphisms.
[1595] 48. The system of claim 46, wherein the at least one polymorphism is three polymorphisms.
[1596] 49. Use of a composition comprising an inhibitor of TL1A for treating a subject, provided the subject is a carrier of a genotype comprising a polymorphism provided in Table 1 or Table 4.
[1597] 50. The use of embodiment 49, wherein the inhibitor of TL1A activity or expression is an anti-TL1A antibody.
[1598] 51. The use of embodiment 50, wherein the anti-TL1A antibody is selected from Table 20.
[1599] 52. The use of embodiment 50, wherein the anti-TL1A antibody comprises an amino acid sequence provided in Tables 16-17.
[1600] 53. The use of embodiment 50, wherein the anti-TL1A antibody binds to the same region of human TL1A as a reference antibody selected from Table 20.
[1601] 54. The use of embodiment 50, wherein the anti-TL1A antibody binds to the same region of human TL1A as a reference antibody, the reference antibody comprising an amino acid sequence provided in Tables 16-17.
[1602] 55. The use of embodiments 50-55, wherein the anti-TL1A antibody is a neutralizing TL1A antibody.
[1603] 56. The use of embodiments 50-55, wherein the anti-TL1A antibody is an antagonist of TL1A.
[1604] 57. The use of embodiments 49-56, wherein the genotype comprises at least two polymorphisms provided in Table 1 or Table 4.
[1605] 58. The use of embodiments 49-56, wherein the genotype comprises at least three polymorphisms provided in Table 1 or Table 4.
[1606] 59. The use of embodiments 49-56, wherein the genotype comprises at least four polymorphisms provided in Table 1 or Table 4.
[1607] 60. The use of embodiments 49-56, wherein the genotype comprises at least five polymorphisms provided in Table 1 or Table 4.
[1608] 61. The use of embodiments 49-56, wherein the genotype comprises at least six polymorphisms provided in Table 1 or Table 4.
[1609] 62. The use of embodiments 49-56, wherein the genotype comprises at least seven polymorphisms provided in Table 1 or Table 4.
[1610] 63. The use of embodiments 49-56, wherein the genotype comprises at least eight polymorphisms provided in Table 1 or Table 4.
[1611] 64. The method of use of embodiments 49-63, wherein the genotype comprises at least one polymorphism comprising a non-reference allele.
[1612] 65. The computer system of embodiments 1-21, wherein said algorithm is configured to classify said sample as a positive therapeutic response to the anti-TL1A therapy with a positive predictive value of at least or about 50%, 55%, 60%, 65%, 70%, 75%, 80%, 85%, 90%, 91%, 92%, 93%, 94% 95%, 96%, 97%, 98%, 99%, or 100%.
[1613] 66. The computer system of embodiments 1-21, wherein said algorithm is configured to classify said sample as a positive therapeutic response to the anti-TL1A therapy with a specificity of at least or about 50%, 55%, 60%, 65%, 70%, 75%, 80%, 85%, 90%, 91%, 92%, 93%, 94% 95%, 96%, 97%, 98%, 99%, or 100%.
[1614] 67. The use of embodiments 22-32, wherein the report classifies the sample as a positive therapeutic response to the anti-TL1A therapy with a positive predictive value of at least or about 50%, 55%, 60%, 65%, 70%, 75%, 80%, 85%, 90%, 91%, 92%, 93%, 94% 95%, 96%, 97%, 98%, 99%, or 100%.
[1615] 68. The use of embodiments 22-32, wherein the report classifies the sample as a positive therapeutic response to the anti-TL1A therapy with a specificity of at least or about 50%, 55%, 60%, 65%, 70%, 75%, 80%, 85%, 90%, 91%, 92%, 93%, 94%95% 96% 97% 98%, 99%, or 100%.
[1616] 69. The system of embodiments 72-78, wherein the report that classifies the sample based on said molecular profile as positive for a therapeutic response to a treatment with an anti-TL1A therapy with a positive predictive value of at least or about 50%, 55%, 60%, 65%, 70%, 75%, 80%, 85%, 90%, 91%, 92%, 93%, 94%95% 96% 97% 98% 99% or 100%. 70. The system of embodiments 72-78, wherein the report that classifies the sample based on said molecular profile as positive for a therapeutic response to a treatment with an anti-TL1A therapy with a specificity of at least or about 50%, 55%, 60%, 65%, 70%, 75%, 80%, 85%, 90%, 91%, 92%, 93%, 94%95% 96% 97% 98% 99% or 100%.

### Definitions

[1617] Unless defined otherwise, all terms of art, notations and other technical and scientific terms or terminology used herein are intended to have the same meaning as is commonly understood by one of ordinary skill in the art to which the claimed subject matter pertains. In some cases, terms with commonly understood meanings are defined herein for clarity and/or for ready reference, and the inclusion of such definitions herein should not necessarily be construed to represent a substantial difference over what is generally understood in the art.

[1618] Throughout this application, various embodiments may be presented in a range format. It should be understood that the description in range format is merely for convenience and brevity and should not be construed as an inflexible limitation on the scope of the disclosure. Accordingly, the description of a range should be considered to have specifically disclosed all the possible subranges as well as individual numerical values within that range. For example, description of a range such as from 1 to 6 should be considered to have specifically disclosed subranges such as from 1 to 3, from 1 to 4, from 1 to 5, from 2 to 4, from 2 to 6, from 3 to 6 etc., as well as individual numbers within that range, for example, 1, 2, 3, 4, 5, and 6. This applies regardless of the breadth of the range.

[1619] As used in the specification and claims, the singular forms “a”, “an” and “the” include plural references unless the context clearly dictates otherwise. For example, the term “a sample” includes a plurality of samples, including mixtures thereof.

[1620] The terms “determining,” “measuring,” “evaluating,” “assessing,” “assaying,” and “analyzing” are often used interchangeably herein to refer to forms of measurement. The terms include determining if an element is present or not (for example, detection). These terms can include quantitative, qualitative or quantitative and qualitative determinations. Assessing can be relative or absolute. “Detecting the presence of” can include determining the amount of something present in addition to determining whether it is present or absent depending on the context.

[1621] The term “in vivo” is used to describe an event that takes place in a subject's body.

[1622] The term “ex vivo” is used to describe an event that takes place outside of a subject's body. An ex vivo assay is not performed on a subject. Rather, it is performed upon a sample separate from a subject. An example of an ex vivo assay performed on a sample is an “in vitro” assay.

[1623] The term “in vitro” is used to describe an event that takes places contained in a container for holding laboratory reagent such that it is separated from the biological source from which the material is obtained. In vitro assays can encompass cell-based assays in which living or dead cells are employed. In vitro assays can also encompass a cell-free assay in which no intact cells are employed.

[1624] As used herein, the term “about” a number refers to that number plus or minus 10% of that number. The term “about” a range refers to that range minus 10% of its lowest value and plus 10% of its greatest value. For instance, an antibody variable region comprising about 80% identity to a reference variable region may comprise 72% to 88% identity to the reference variable region.

[1625] The terms “complementarity determining region,” and “CDR,” which are synonymous with “hypervariable region” or “HVR,” are known in the art to refer to non contiguous sequences of amino acids within antibody variable regions, which confer antigen specificity and/or binding affinity. In general, there are three CDRs in each heavy chain variable region (CDR-H1, CDR-H2, CDR-H3) and three CDRs in each light chain variable region (CDR-L1, CDR-L2, CDR-L3). “Framework regions” and “FR” are known in the art to refer to the non-CDR portions of the variable regions of the heavy and light chains. In general, there are four FRs in each full-length heavy chain variable region (FR-H1, FR-H2, FR-H3, and FR-H4), and four FRs in each full-length light chain variable region (FR-L1, FR-L2, FR-L3, and FR-L4). The precise amino acid sequence boundaries of a given CDR or FR can be readily determined using any of a number of well-known schemes, including those described by Kabat et al. (1991), “Sequences of Proteins of Immunological Interest,” 5th Ed. Public Health Service, National Institutes of Health, Bethesda, Md. (“Kabat” numbering scheme), Al-Lazikani et al., (1997) JMB 273, 927-948 (“Chothia” numbering scheme); MacCallum et al., J. Mol. Biol. 262:732-745 (1996), “Antibody-antigen interactions: Contact analysis and binding site topography,” J. Mol. Biol. 262, 732-745.” (“Contact” numbering scheme); Lefranc M P et al., “IMGT unique numbering for immunoglobulin and T cell receptor variable domains and Ig superfamily V-like domains,” Dev Comp Immunol, 2003 Jan; 27(1):55-77 (“IMGT” numbering scheme); Honegger A and Pluckthun A, “Yet another numbering scheme for immunoglobulin variable domains: an automatic modeling and analysis tool,” J Mol Biol, 2001 Jun 8; 309(3):657-70, (“Aho” numbering scheme); and Whitelegg N R and Rees A R, “WAM: an improved algorithm for modelling antibodies on the WEB,” Protein Eng. 2000 December; 13 (12):819-24 (“AbM” numbering scheme. In certain embodiments, the CDRs of the antibodies described herein can be defined by a method selected from Kabat, Chothia, IMGT, Aho, AbM, or combinations thereof.

[1626] In some embodiments, an antibody that specifically binds to a protein indicates that the antibody reacts or associates more frequently, more rapidly, with greater duration, with greater affinity, or with some combination of the above to the protein than with alternative substances, including unrelated proteins.

[1627] In some embodiments, the terms “polypeptide,” “peptide,” and “protein” are used interchangeably herein to refer to polymers of amino acids of any length. The polymer may be linear or branched, it may comprise modified amino acids, and it may be interrupted by non-amino acids. The terms also encompass an amino acid polymer that has been modified naturally or by intervention; for example, disulfide bond formation, glycosylation, lipidation, acetylation, phosphorylation, or any other manipulation or modification, such as fusion with another polypeptide and/or conjugation, e.g., with a labeling component. Also included within the definition are, for example, polypeptides containing one or more analogs of an amino acid (for example, unnatural amino acids, etc.), as well as other modifications known in the art.

[1628] In some embodiments, a protein such as an antibody described herein comprises a hydrophobic amino acid. Non-limiting exemplary hydrophobic amino acids include glycine (Gly), proline (Pro), phenylalanine (Phe), alanine (Ala), isoleucine (Ile), leucine (Leu), and valine (Val). In some embodiments, a protein such as an antibody described herein comprises a hydrophilic amino acid. Non-limiting exemplary hydrophilic amino acids include serine (Ser), threonine (Thr), aspartic acid (Asp), glutamic acid (Glu), cysteine (Cys), asparagine (Asn), glutamine (Gln), arginine (Arg), and histidine (His). In some embodiments, a protein such as an antibody described herein comprises an amphipathic amino acid. Non-limiting exemplary amphipathic amino acids include lysine (Lys), tryptophan (Trp), tyrosine (Tyr), and methionine (Met). In some embodiments, a protein such as an antibody described herein comprises an aliphatic amino acid. Non-limiting exemplary aliphatic amino acids include alanine (Ala), isoleucine (Ile), leucine (Leu) and valine (Val). In some embodiments, a protein such as an antibody described herein comprises an aromatic amino acid. Non-limiting exemplary aromatic amino acids include phenylalanine (Phe), tryptophan (Trp), and tyrosine (Tyr). In some embodiments, a protein such as an antibody described herein comprises an acidic amino acid. Non-limiting exemplary acidic amino acids include aspartic acid (Asp) and glutamic acid (Glu). In some embodiments, a protein such as an antibody described herein comprises a basic amino acid. Non-limiting exemplary basic amino acids include arginine (Arg), histidine (His), and lysine (Lys). In some embodiments, a protein such as an antibody described herein comprises a hydroxylic amino acid. Non-limiting exemplary hydroxylic amino acids include serine (Ser) and threonine (Thr). In some embodiments, a protein such as an antibody described herein comprises a sulfur-containing amino acid. Non-limiting exemplary sulfur-containing amino acids include cysteine (Cys) and methionine (Met). In some embodiments, a protein such as an antibody described herein comprises an amidic amino acid. Non-limiting exemplary amidic amino acids include asparagine (Asn) and glutamine (Gln).

[1629] As used herein, the terms “homologous,” “homology,” or “percent homology” when used herein to describe to an amino acid sequence or a nucleic acid sequence, relative to a reference sequence, can be determined using the formula described by Karlin and Altschul (Proc. Natl. Acad. Sci. USA 87: 2264-2268, 1990, modified as in Proc. Natl. Acad. Sci. USA 90:5873-5877, 1993). Such a formula is incorporated into the basic local alignment search tool (BLAST) programs of Altschul et al. (J Mol Biol. 1990 Oct. 5; 215 (3):403-10; Nucleic Acids Res. 1997 Sep. 1; 25(17):3389-402). Percent homology of sequences can be determined using the most recent version of BLAST, as of the filing date of this application. Percent identity of sequences can be determined using the most recent version of BLAST, as of the filing date of this application.

[1630] As used herein, the term “percent (%) identity”, or “percent sequence identity,” with respect to a reference polypeptide sequence is the percentage of amino acid residues in a candidate sequence that are identical with the amino acid residues in the reference polypeptide sequence, after aligning the sequences and introducing gaps, if necessary, to achieve the maximum percent sequence identity, and not considering any conservative substitutions as part of the sequence identity. As used herein, the term “percent (%) identity”, or “percent sequence identity,” with respect to a reference nucleic acid sequence is the percentage of nucleotides in a candidate sequence that are identical with the nucleotides in the reference nucleic acid sequence, after aligning the sequences and introducing gaps, if necessary, to achieve the maximum percent sequence identity. Alignment for purposes of determining percent sequence identity can be achieved in various ways that are known for instance, using publicly available computer software such as BLAST, BLAST-2, ALIGN or Megalign (DNASTAR) software. Appropriate parameters for aligning sequences are able to be determined, including algorithms needed to achieve maximal alignment over the full length of the sequences being compared. For purposes herein, however, % amino acid sequence identity values are generated using the sequence comparison computer program ALIGN-2. The ALIGN-2 sequence comparison computer program was authored by Genentech, Inc., and the source code has been filed with user documentation in the U.S. Copyright Office, Washington D.C., 20559, where tt is registered under U.S. Copyright Registration No. TXU510087. The ALIGN-2 program is publicly available from Genentech, Inc., South San Francisco, Calif., or may be compiled from the source code. The ALIGN-2 program should be compiled for use on a UNIX operating system, including digital UNIX V4.0D. All sequence comparison parameters are set by the ALIGN-2 program and do not vary.

[1631] In situations where ALIGN-2 is employed for amino acid sequence comparisons, the % amino acid sequence identity of a given amino acid sequence A to, with, or against a given amino acid sequence B (which can alternatively be phrased as a given amino acid sequence A that has or comprises a certain % amino acid sequence identity to, with, or against a given amino acid sequence B) is calculated as follows: 100 times the fraction X/Y, where X is the number of amino acid residues scored as identical matches by the sequence alignment program ALIGN-2 in that program's alignment of A and B, and where Y is the total number of amino acid residues in B. It will be appreciated that where the length of amino acid sequence A is not equal to the length of amino acid sequence B, the % amino acid sequence identity of A to B will not equal the % amino acid sequence identity of B to A. Unless specifically stated otherwise, all % amino acid sequence identity values used herein are obtained as described in the immediately preceding paragraph using the ALIGN-2 computer program.

[1632] The terms “increased,” or “increase” are used herein to generally mean an increase by a statically significant amount. In some embodiments, the terms “increased,” or “increase,” mean an increase of at least 10% as compared to a reference level, for example an increase of at least about 10%, at least about 20%, or at least about 30%, or at least about 40%, or at least about 50%, or at least about 60%, or at least about 70%, or at least about 80%, or at least about 90% or up to and including a 100% increase or any increase between 10-100% as compared to a reference level, standard, or control. Other examples of “increase” include an increase of at least 2-fold, at least 5-fold, at least 10-fold, at least 20-fold, at least 50-fold, at least 100-fold, at least 1000-fold or more as compared to a reference level. An increase can be an absolute amount (e.g., level of protein expression), or a rate of production (e.g., rate of protein expression between two points in time).

[1633] The terms, “decreased” or “decrease” are used herein generally to mean a decrease by a statistically significant amount. In some embodiments, “decreased” or “decrease” means a reduction by at least 10% as compared to a reference level, for example a decrease by at least about 20%, or at least about 30%, or at least about 40%, or at least about 50%, or at least about 60%, or at least about 70%, or at least about 80%, or at least about 90% or up to and including a 100% decrease (e.g., absent level or non-detectable level as compared to a reference level), or any decrease between 10-100% as compared to a reference level. In the context of a marker or symptom, by these terms is meant a statistically significant decrease in such level. The decrease can be, for example, at least 10%, at least 20%, at least 30%, at least 40% or more, and is preferably down to a level accepted as within the range of normal for an individual without a given disease.

[1634] In some embodiments, the terms “individual” or “subject” are used interchangeably and refer to any animal, including, but not limited to, humans, non-human primates, rodents, and domestic and game animals, which is to be the recipient of a particular treatment. Primates include chimpanzees, cynomolgus monkeys, spider monkeys, and macaques, e.g., Rhesus. Rodents include mice, rats, woodchucks, ferrets, rabbits and hamsters. Domestic and game animals include cows, horses, pigs, deer, bison, buffalo, feline species, e.g., domestic cat, canine species, e.g., dog, fox, wolf, avian species, e.g., chicken, emu, ostrich, and fish, e.g., trout, catfish and salmon. In various embodiments, a subject can be one who has been previously diagnosed with or identified as suffering from or having a condition in need of treatment. In certain embodiments, the subject is a human. In various other embodiments, the subject previously diagnosed with or identified as suffering from or having a condition may or may not have undergone treatment for a condition. In yet other embodiments, a subject can also be one who has not been previously diagnosed as having a condition (i.e., a subject who exhibits one or more risk factors for a condition). A “subject in need” of treatment for a particular condition can be a subject having that condition, diagnosed as having that condition, or at risk of developing that condition. In some embodiments, the subject is a “patient,” that has been diagnosed with a disease or condition described herein.

[1635] The term “gene,” as used herein, refers to a segment of nucleic acid that encodes an individual protein or RNA (also referred to as a “coding sequence” or “coding region”), optionally together with associated regulatory region such as promoter, operator, terminator and the like, which may be located upstream or downstream of the coding sequence. A “genetic locus” referred to herein, is a particular location within a gene.

[1636] The term, “genotype” as disclosed herein, refers to the chemical composition of polynucleotide sequences within the genome of an individual. In some embodiments, the genotype comprises a single nucleotide polymorphism (SNP) or and indel (insertion or deletion, of a nucleobase within a polynucleotide sequence). In some embodiments, a genotype for a particular SNP, or indel is heterozygous. In some embodiments, a genotype for a particular SNP, or indel is homozygous.

[1637] A “polymorphism” as used herein refers to an aberration in (e.g., a mutation), or of (e.g., insertion/deletion), a nucleic acid sequence, as compared to the nucleic acid sequence in a reference population. In some embodiments, the polymorphism is common in the reference population. In some embodiments, the polymorphism is rare in the reference population. In some embodiments, the polymorphism is a single nucleotide polymorphism.

[1638] The term, “single nucleotide polymorphism” or SNP as disclosed herein, refers to a variation in a single nucleotide within a polynucleotide sequence. The term should not be interpreted as placing a restriction on a frequency of the SNP in a given population. The variation of an SNP may have multiple different forms. A single form of an SNP is referred to as an “allele.” An SNP can be mono-, bi-, tri, or tetra-allelic. A SNP may include a “risk allele,” a “protective allele,” or neither. By way of example, a reference polynucleotide sequence reading 5′ to 3′ is TTACG. A SNP at allele position 3 (of 5′-TTACG-3′) comprise a substitution of the reference allele, “A” to a non-reference allele, “C.” If the “C” allele of the SNP is associated with an increased probability of developing a phenotypic trait, the allele is considered a “risk” allele. However, the same SNP may also comprise a substitution of the “A” allele to a “T” allele at position 3. If the T allele of the SNP is associated with a decreased probability of developing a phenotypic trait, the allele is considered a “protective” allele. The SNP may be observed in at least 1% of a given population. In some embodiments, the SNP is represented by an “rs” number, which refers to the accession of reference cluster of one more submitted SNPs in the dbSNP bioinformatics database as of the filing date of this patent application, and which is included within a sequence that comprises the total number of nucleobases from 5′ to 3′. In some embodiments, a SNP may be further defined by the position of the SNP (nucleobase) within the dbSNP sequence, the position of which is always with reference to 5′ length of the sequence plus 1. In some embodiments, a SNP is defined as the genomic position in a reference genome and the allele change (e.g. chromosome 7 at position 234,123,567 from G allele to A allele in the reference human genome build 37). In some embodiments, the SNV is defined as the genomic position identified with [brackets] or an “N” in a sequence disclosed herein.

[1639] The term, “indel,” as disclosed herein, refers to an insertion, or a deletion, of a nucleobase within a polynucleotide sequence. An indel can be mono-, bi-, tri, or tetra-allelic. An indel may be “risk,” a “protective,” or neither, for a phenotypic trait. In some embodiments, the indel is represented by an “rs” number, which refers to the accession of reference cluster of one more submitted indels in the dbSNP bioinformatics database as of the filing date of this patent application, and which is included in a sequence that comprises the total number of nucleobases from 5′ to 3′. In some embodiments, an indel may be further defined by the position of the insertion/deletion within the dbSNP sequence, the position of which is always with reference to the 5′ length of the sequence plus 1. In some embodiments, an indel is defined as the genomic position in a reference genome and the allele change. In some embodiments, the indel is defined as the genomic position identified with [brackets] or an “N” in a sequence disclosed herein.

[1640] “Haplotype” as used herein, encompasses a group of one or more genotypes, which tend to be inherited together in a reference population. In some embodiments, a haplotype comprises particular polymorphism or another polymorphism in linkage disequilibrium (LD) therewith.

[1641] “Linkage disequilibrium,” or “LD,” as used herein refers to the non-random association of alleles or indels in different gene loci in a given population. LD may be defined by a D′ value corresponding to the difference between an observed and expected allele or indel frequencies in the population (D=Pab−PaPb), which is scaled by the theoretical maximum value of D. LD may be defined by an r² value corresponding to the difference between an observed and expected unit of risk frequencies in the population (D=Pab−PaPb), which is scaled by the individual frequencies of the different loci. In some embodiments, D′ comprises at least 0.20. In some embodiments, r² comprises at least 0.70.

[1642] In some embodiments, “polynucleotide,” or “nucleic acid,” as used interchangeably herein, refer to polymers of nucleotides of any length, and include DNA and RNA. The nucleotides can be deoxyribonucleotides, ribonucleotides, modified nucleotides or bases, and/or their analogs, or any substrate that can be incorporated into a polymer by DNA or RNA polymerase. A polynucleotide may comprise modified nucleotides, such as, but not limited to methylated nucleotides and their analogs or non-nucleotide components. Modifications to the nucleotide structure may be imparted before or after assembly of the polymer. A polynucleotide may be further modified after polymerization, such as by conjugation with a labeling component.

[1643] The term “medically refractory,” or “refractory,” as used herein, refers to the failure of a standard treatment to induce remission of a disease. In some embodiments, the disease comprises an inflammatory disease disclosed herein. A non-limiting example of refractory inflammatory disease includes refractory Crohn's disease, and refractory ulcerative colitis (e.g., mrUC). Non-limiting examples of standard treatment include glucocorticosteriods, anti-TNF therapy, anti-a4-b7 therapy (vedolizumab), anti-IL12p40 therapy (ustekinumab), Thalidomide, and Cytoxin.

[1644] The terms “treat,” “treating,” and “treatment” as used herein refers to alleviating or abrogating a disorder, disease, or condition; or one or more of the symptoms associated with the disorder, disease, or condition; or alleviating or eradicating a cause of the disorder, disease, or condition itself. Desirable effects of treatment can include, but are not limited to, preventing occurrence or recurrence of disease, alleviation of symptoms, diminishing any direct or indirect pathological consequences of the disease, preventing metastasis, decreasing the rate of disease progression, amelioration or palliation of the disease state and remission or improved prognosis.

[1645] The term “therapeutically effective amount” refers to the amount of a compound or therapy that, when administered, is sufficient to prevent development of, or alleviate to some extent, one or more of the symptoms of a disorder, disease, or condition of the disease; or the amount of a compound that is sufficient to elicit biological or medical response of a cell, tissue, system, animal, or human that is being sought by a researcher, veterinarian, medical doctor, or clinician. In some cases, therapeutically effective amount of the drug reduces the severity of symptoms of the disease or disorder. In some instances, the disease or disorder comprises inflammatory bowel disease (IBD), Crohn's disease (CD), or ulcerative colitis (UC). In some instances, the IBD, CD, and/or UC are severe or medically refractory forms of the IBD, CD, and/or UC. Non-limiting examples of symptoms of IBD, CD, and/or UC include, but are not limited to, diarrhea, fever, fatigue, abdominal pain, abdominal cramping, inflammation, ulceration, nausea, vomiting, bleeding, blood in stool, reduced appetite, and weight loss.

[1646] The term “pharmaceutically acceptable carrier,” “pharmaceutically acceptable excipient,” “physiologically acceptable carrier,” or “physiologically acceptable excipient” refers to a pharmaceutically-acceptable material, composition, or vehicle, such as a liquid or solid filler, diluent, excipient, solvent, or encapsulating material. A component can be “pharmaceutically acceptable” in the sense of being compatible with the other ingredients of a pharmaceutical formulation. It can also be suitable for use in contact with the tissue or organ of humans and animals without excessive toxicity, irritation, allergic response, immunogenicity, or other problems or complications, commensurate with a reasonable benefit/risk ratio. See, Remington: The Science and Practice of Pharmacy, 21st Edition; Lippincott Williams & Wilkins: Philadelphia, Pa., 2005; Handbook of Pharmaceutical Excipients, 5th Edition; Rowe et al., Eds., The Pharmaceutical Press and the American Pharmaceutical Association: 2005; and Handbook of Pharmaceutical Additives, 3rd Edition; Ash and Ash Eds., Gower Publishing Company: 2007; Pharmaceutical Preformulation and Formulation, Gibson Ed., CRC Press LLC: Boca Raton, Fla., 2004).

[1647] The term “pharmaceutical composition” refers to a mixture of a compound disclosed herein with other chemical components, such as diluents or carriers. The pharmaceutical composition can facilitate administration of the compound to an organism. Multiple techniques of administering a compound exist in the art including, but not limited to, oral, injection, aerosol, parenteral, and topical administration.

[1648] The term “inflammatory bowel disease” or “IBD” as used herein refers to gastrointestinal disorders of the gastrointestinal tract. Non-limiting examples of IBD include, Crohn's disease (CD), ulcerative colitis (UC), indeterminate colitis (IC), microscopic colitis, diversion colitis, Behcet's disease, and other inconclusive forms of IBD. In some instances, IBD comprises fibrosis, fibrostenosis, stricturing and/or penetrating disease, obstructive disease, or a disease that is refractory (e.g., mrUC, refractory CD), perianal CD, or other complicated forms of IBD.

[1649] Non-limiting examples of “sample” include any material from which nucleic acids and/or proteins can be obtained. As non-limiting examples, this includes whole blood, peripheral blood, plasma, serum, saliva, mucus, urine, semen, lymph, fecal extract, cheek swab, cells or other bodily fluid or tissue, including but not limited to tissue obtained through surgical biopsy or surgical resection. In various embodiments, the sample comprises tissue from the large and/or small intestine. In various embodiments, the large intestine sample comprises the cecum, colon (the ascending colon, the transverse colon, the descending colon, and the sigmoid colon), rectum and/or the anal canal. In some embodiments, the small intestine sample comprises the duodenum, jejunum, and/or the ileum. Alternatively, a sample can be obtained through primary patient derived cell lines, or archived patient samples in the form of preserved samples, or fresh frozen samples.

[1650] The term “biomarker” comprises a measurable substance in a subject whose presence, level, or activity, is indicative of a phenomenon (e.g., phenotypic expression or activity; disease, condition, subclinical phenotype of a disease or condition, infection; or environmental stimuli). In some embodiments, a biomarker comprises a gene, gene expression product (e.g., RNA or protein), or a cell-type (e.g., immune cell).

[1651] The term “serological marker,” as used herein refers to a type of biomarker representing an antigenic response in a subject that may be detected in the serum of the subject. In some embodiments, a serological comprises an antibody against various fungal antigens. Non-limiting examples of a serological marker comprise anti-Saccharomyces cerevisiae antibody (ASCA), an anti-neutrophil cytoplasmic antibody (ANCA), E. coli outer membrane porin protein C (OmpC), anti-Malassezia restricta antibody, anti-Malassezia pachydermatis antibody, anti-Malassezia furfur antibody, anti-Malassezia globasa antibody, anti-Cladosporium albicans antibody, anti-laminaribiose antibody (ALCA), anti-chitobioside antibody (ACCA), anti-laminarin antibody, anti-chitin antibody, pANCA antibody, anit-I2 antibody, and anti-Cbir1 flagellin antibody.

[1652] The term “microbiome” and its variation used herein describe the populations and interactions of the bacteria, fungi, protists, and virus that align the gastrointestinal tract of a subject. A subject afflicted with IBD may possess presence, absence, excess, diminished, or a combination thereof of a microbiome s compared to a healthy subject.

[1653] The terms “non-response,” or “loss-of-response,” as used herein, refer to phenomena in which a subject or a patient does not respond to the induction of a standard treatment (e.g., anti-TNF therapy), or experiences a loss of response to the standard treatment after a successful induction of the therapy. The induction of the standard treatment may include 1, 2, 3, 4, or 5, doses of the therapy. A“successful induction” of the therapy may be an initial therapeutic response or benefit provided by the therapy. The loss of response may be characterized by a reappearance of symptoms consistent with a flare after a successful induction of the therapy.

[1654] The section headings used herein are for organizational purposes only and are not to be construed as limiting the subject matter described.

### EXAMPLES

[1655] The following examples are included for illustrative purposes only and are not intended to limit the scope of the invention.

### Example 1: Overview of the Identification of Genotypes

[1656] Tumor Necrosis Factor (Ligand) Superfamily, Member 15 (TNFSF15) has been determined to be significantly associated with inflammatory bowel disease (IBD), including Crohn's disease (CD), by Genome Wide Association Studies (GWAS) (e.g., cases versus controls). In addition, increased levels of TL1A (e.g., RNA and protein) are associated with IBD, including CD. Therefore, therapeutic strategies targeting TNFSF15 (TL1A) expression or activity offer a promising approach for the treatment of IBD. Disclosed herein is the identification of polymorphisms that are associated with, and therefore predictive of, an increase in TNFSF15 (TL1A) expression in patients with IBD, including CD, using a machine learning approach.

[1657] A polygenic risk score (PRS) adapted to identify individuals at risk for having increased TNFSF15 (TL1A) was applied to a cohort of CD patients recruited at the Cedars-Sinai Medical Center. A machine learning algorithm (e.g., XGBoost) was used to identify combinations of polymorphisms associated with increased TNFSF15 (TL1A) expression or activity. The resulting 41 polymorphisms, and a possible combinations of polymorphisms, have optimal prediction precision across multiple iterations of training the machine learning algorithm, which was able to analyze large combinations of polymorphism interactions (e.g., including non-linear interactions) in an efficient manner, which traditional GWAS methodologies cannot achieve. The resulting polymorphisms are useful for selecting a subject, who may or may not be diagnosed with IBD, who may exhibit a therapeutic response to an TNFSF15 (TL1A)-targeting therapeutic agent (e.g., neutralizing anti-TL1A antibody).

### Example 2: Calculation of TNFSF15 PRS

[1658] A polygenic risk score (PRS) based on polymorphisms within multiple genes of interest (e.g., involved in the TL1A-mediated inflammatory pathways) and their associated weights in each respective reference population was calculated. The PRS is referred to herein as the “TNFSF15 PRS.” The polymorphisms were selected from multiple GWAS based on a defined distances from the transcription start and stop sites for the gene(s) of interest (e.g., 250 kilobases upstream and downstream). Each GWAS was to define the individual weights for contribution of a polymorphism to the total score. The GWAS used include, but are not limited to, Jostins et al., 2012. Nature. 491:119-124, Liu et al., 2015. Nat Genet. 47:979-986, Ellinghaus et al., 2016. Nat Genet. 48:510-518, Huang et al., 2017. Nat Genet. 49:256-261, and de Lange et al., 2017. Nat Genet. 48:256-261.

[1659] To confirm the relevance of inclusion of a polymorphism within the TNFSF15 PRS, the polymorphisms were cross-checked by (i) evidence of cis-QTL, where the SNP is directly associated with target gene expression in tissues and (ii) sensitivity analysis, where selected polymorphisms are removed from the TNFSF15 PRS and a regression analysis is run against disease susceptibility and subclinical phenotypes, thus highlighting relevant polymorphisms to disease risk. In some cases, the polymorphisms were subjected to sensitivity analysis, and in other cases, they were not. For example, in some cases, only those polymorphisms with questionable association to the pathway TNFSF15 PRS (e.g., no eQTL or multiple genes within the loci) are subjected to sensitivity analysis.

[1660] Patients with Crohn's disease (CD) were recruited. The diagnosis of each patient was based on standard endoscopic, histologic, and radiographic features. Blood samples were collected from patients at the time of enrollment. Genotyping was performed using Immunochip (ICHIP) per manufacturer's protocol on all samples collected.

[1661] A TNFSF15 PRS was calculated for Caucasian patients within a Cedars-Sinai CD cohort from Example 1, based on the defined set of polymorphisms selected in this Example 2, which are provided in Table 4. An exemplary calculation of TNFSF15 PRS is outlined in Li et al., 2018. Inflamm Bowel Dis. 12; 24(11):2413-2422. The TNFSF15 PRS is calculated as the weighted sum of the number of risk alleles carried by each patient (in the Cedars-Sinai CD cohort) (0, 1, or 2) at each loci for the genes described in this Example 2, divided by a total number of genetic variants used in the model. The same calculations were performed for each individual belonging to a reference group, thereby generating a range of raw scores (observed range). The resulting TNFSF15 PRS is generated by comparing the score of each patient with the observed range observed in the reference group.

TABLE 4
TNFSF15 Polygenic Risk Score (PRS) Polymorphisms

| | | | Minor | | | | |
|---|---|---|---|---|---|---|---|
| | | Minor | Allele | Major | | | Seq |
| rsID | Illumina_id | Allele | Frequency | Allele | Chromosome | Gene | ID No. |
| rs11221332 | imm_11_127886184 | A | 0.232475 | G | chr11 | ETS1 | 20041 |
| rs7134599 | imm_12_66786342 | A | 0.381954 | G | chr12 | IFNG | 20042 |
| rs6062496 | imm_20_61799543 | G | 0.406514 | A | chr20 | TNFRSF6B | 20043 |
| rs4246905 | imm_9_116593070 | A | 0.270925 | G | chr9 | TNFSF15 | 2008 |
| rs7468800 | imm_9_116631826 | A | 0.124622 | C | chr9 | TNFSF15; TNFSF8 | 20044 |
| rs1569328 | rs1569328 | A | 0.14869 | G | chr14 | U2; FOS | 20045 |
| rs2284553 | rs2284553 | A | 0.386244 | G | chr21 | IFNGR2 | 20046 |
| rs6062504 | rs6062504 | A | 0.27128 | G | chr20 | ZGPAT | 20047 |
| rs7556897 | rs7556897 | G | 0.334936 | A | chr2 | SLC19A3; CCL20 | 20048 |

### Example 3: XGBoost Machine Learning Algorithm Trained on Binary Classifiers Based on TNFSF15 Polygenic Risk Score

[1662] A binary classifier to be used in the XGBoost machine learning platform for CD samples was created based on the distribution of the TNFSF15 PRS scores (calculated in Example 2) across the CD cohort. In this example, patient samples from the CD cohort were classified as 0 if their TNFSF15 PRS was ≤25th percentile of the TNFSF15 PRS CD distribution. Patient samples were classified as 1 if their TNFSF15 PRS was ≥75th percentile of the TNFSF15 PRS CD distribution.

[1663] Once the initial classifier of TNFSF15 SNPs was established, the XGBoost algorithm was optimized for the polymorphisms and implemented to generate an initial list of candidate polymorphisms. XGBoost is rooted in the gradient boosted decision trees, which in contrast to lasso and ridge regression methods, incorporates complex non-linear feature interactions into prediction models in a non-additive form. Exemplary optimization and implementation procedures are provided in Behravan et al. Sci Rep. 2018; 8:13149. A total of ten iterations of 5-fold cross validation were used to obtain an initial list of candidate polymorphisms. These polymorphisms were further filtered/optimized using an adaptive iterative search procedure as outlined in Behravan et al. as well as support vector machines (SVM) resulting in a final list of SNPs, which had high prediction precision (>90%) for the TNFSF15 PRS binary classifier.

### Example 4: XGBoost Machine Learning Algorithm Trained on Binary Classifiers Based on TNFSF15 Protein Expression

[1664] Patients with Crohn's disease (CD) were recruited. The diagnosis of each patient was based on standard endoscopic, histologic, and radiographic features. Blood samples were collected from the patients. All patients were genotyped either by Illumina ImmunoArray or polymerase chain reaction (PCR) under standard hybridization conditions. Peripheral blood mononuclear cells (PBMCs) were isolated from the blood samples. The PMBCs were stimulated in vitro with immune complex. Supernatants were collected from unstimulated samples and from stimulated samples at 6, 18, 24, and 72 hours. Soluble TL1A protein in the supernatants was quantified using a plate-based ELISA using and monoclonal antibodies at all time points.

[1665] Binary classifiers to be used in the XGBoost machine learning platform for the samples were derived using TL1A protein expression levels at 6 hours. The classifier at 6 hours reflects absolute levels of TL1A protein expression at that time point. Additional binary classifiers were derived using the results of clustering of samples (k=2 and k=3 groups) based on TNFSF15 protein expression across 6, 18, 24, and 72-hour time points. The classifiers at the combination of time points (e.g., 6, 18, 24, and 72) reflect a rate of production of TL1A between time points. The clustering was performed using the TMixClust Bioconductor package as described in Golumbeanu et al. (“Clustering time series gene expression data with TMixClust 2018). A set of predictive SNPs was obtained from each of the three XGBoost analyses of the three classifiers. The polymorphisms identified here were compared to the list of polymorphisms generated in Example 3 to identify only those polymorphisms that overlap between the two analyses.

[1666] Determination of overlaps of SNPs was performed on the gene annotation (refGene annotation) of the generated SNPs and not on the actual ICHIP or dbSNP reference sequence identification numbers. Only polymorphisms with minor allele frequencies (MAF)≥0.1 and the beta coefficients (from support vector machine (SVM) runs) with absolute values≥0.1 were kept. This resulted in 129 polymorphisms remaining for further analysis. The 9 polymorphisms used in the TNFF15 PRS (Table 4) were also added to this list of SNPs, resulting in a total of 138 SNPs.

### Example 5: Implementation of Market Basket Analysis to Determine Non-Linear Polymorphism Combination Rules Associated with CD

[1667] In order to further filter out SNPs not strongly associated with clinical phenotypes, a market basket analysis approach was used to determine combination rules for the polymorphisms associated with Crohn's Disease (CD) clinical phenotypes. An exemplary market basket analysis is described in Breuer et al. Int J Bipolar Disord. 2018; 6:24). The initial dataset on CD localization and CD characterization was obtained from 1,803 CD cohorts from Cedars-Sinai Medical Center. The RUDI (Rule Discoverer) program (dominant minor model), also described in Breuer et al., was run on the 1,803 CD cohorts using the genotypes of the previously generated 138 SNPs (Example 4). The analysis resulted in 57 rules with significant associations with clinical phenotypes for Crohn's Disease. The clinical phenotypes used in the analysis were CD location (ileum, colon, and ilealcolon), CD characterization (non-stricturing/non-penetrating, stricturing, stricturing and internal penetrating, and isolated internal penetrating), and presence of perianal disease. The 57 association rules consisted of only 89 out of the 138 input polymorphisms from Example 4. Therefore, only these 89 polymorphisms were considered for further evaluation.

[1668] Finally, support vector machines (SVM) analysis based on the 3 binary classifiers described in Example 3 and Example 4 were re-applied to this list of 89 polymorphisms. Only XGBoost models (and their corresponding polymorphisms) with a prediction precision≥0.70 were maintained. And further, only the polymorphisms from these models with an SVM coefficient 0.25 or an SVM coefficient≤−0.25 were kept. Applying these filters, a total of 41 polymorphisms were generated when analyzing all 3 classifiers. These polymorphisms and reference alleles are provided in Table 1. The nucleic acid sequences comprising the polymorphisms are provided in SEQ ID NOS: 1-41, or 57-59, and the position of the polymorphism within the nucleic acid sequence is indicated with a non-nucleobase letter (e.g., V, R, S, and the like). The sequences provided are from build 151.

[1669] The polymorphisms identified in the analysis provided in the Examples above may be used to predict a positive therapeutic response in a subject or a patient to an inhibitor of TL1A activity or expression (e.g., anti-TL1A antibody), either alone, or in combinations (e.g., 2, 3, 4, 5, 6, 7, and so forth). The polymorphisms described herein may be used in a diagnostic or prognostic test to identify a subject suitable for treatment with an inhibitor of TL1A activity or expression to treat a disease or condition described herein in the subject. In some cases, the diagnostic is a companion diagnostic test, such as for example, a TL1A companion diagnostic test (“TL1A CDx”).

[1670] In a non-limiting example, any combination of three polymorphisms, each selected from Table 1, may be used to predict a positive therapeutic response to an inhibitor of TL1A activity or expression. Exemplary three-polymorphism combinations include: imm_9_116608587, imm_11_127948309, and rs1892231; imm_9_116608587, imm_11_127948309, and rs9806914; imm_9_116608587, imm_11_127948309, and imm_21_44478192; imm_9_116608587, imm_11_127948309, and imm_21_44479552 imm_9_116608587, rs1892231, and rs9806914; imm_9_116608587, rs1892231, and imm_21_44478192; imm_9_116608587, rs1892231, and imm_21_44479552; imm_9_116608587, rs9806914, and imm_21_44478192; imm_9_116608587, rs9806914, and imm_21_44479552; imm_9_116608587, imm_21_44478192, and imm_21_44479552; imm_11_127948309, rs1892231, and rs9806914; imm_11_127948309, rs1892231, and imm_21_44478192; imm_11_127948309, rs1892231, and imm_21_44479552; imm_11_127948309, rs9806914, and imm_21_44478192; imm_11_127948309, rs9806914, and imm_21_44479552; imm_11_127948309, imm_21_44478192, and imm_21_44479552; rs1892231, rs9806914, and imm_21_44478192; rs1892231, rs9806914, and imm_21_44479552; rs1892231, imm_21_44478192, and imm_21_44479552; and rs9806914, imm_21_44478192, and imm_21_44479552.

[1671] Table 5 provides a table with the position of each polymorphism provided in Table 1 within the human genome according to GRCh38.p13 Primary Assembly. The nucleic acid sequence flanking each polymorphism is identified with the relevant SEQ ID NO.

TABLE 5
GRCh38.p13 Primary Assembly Positions of Polymorphisms

| | SEQ | |
|---|---|---|
| | ID | |
| dbSNP | NO: | SNP_SEQ_GRCh38.p13 Primary Assembly |
| rs11897732 | 2060 | >NC_000002.12:43313747-43314246 |
| | | Homo sapiens chromosome 2 |
| | | SEQ = [G/A] |
| | | >NC_000002.12:43314248-43314747 |
| | | Homo sapiens chromosome 2 |
| rs6740739 | 2061 | >NC_000002.12:43628004-43628503 |
| | | Homo sapiens chromosome 2 |
| | | SEQ = [G/A] |
| | | >NC_000002.12:43628505-43629004 |
| | | Homo sapiens chromosome 2 |
| rs17796285 | 2062 | >NC_000008.11:11266446-11266945 |
| | | Homo sapiens chromosome 8 |
| | | SEQ = [G/A/C/T] |
| | | >NC_000008.11:11266947-11267446 |
| | | Homo sapiens chromosome 8 |
| rs7935393 | 2063 | >NC_000011.10:128572704-128573203 |
| | | Homo sapiens chromosome 11 |
| | | SEQ = [A/C] |
| | | >NC_000011.10:128573205-128573704 |
| | | Homo sapiens chromosome 11 |
| rs12934476 | 2064 | >NC_000016.10:11237152-11237651 |
| | | Homo sapiens chromosome 16 |
| | | SEQ = [A/G] |
| | | >NC_000016.10:11237653-11238152 |
| | | Homo sapiens chromosome 16 |
| rs12457255 | 2065 | >NC_000018.10:12759477-12759976 |
| | | Homo sapiens chromosome 18 |
| | | SEQ = [C/A] |
| | | >NC_000018.10:12759978-12760477 |
| | | Homo sapiens chromosome 18 |
| rs2070557 | 2066 | >NC_000021.9:44234741-44235240 |
| | | Homo sapiens chromosome 21 |
| | | SEQ = [A/T] |
| | | >NC_000021.9:44235242-44235741 |
| | | Homo sapiens chromosome 21 |
| rs4246905 | 2067 | >NC_000009.12:114790469-114790968 |
| | | Homo sapiens chromosome 9 |
| | | SEQ = [T/A/C] |
| | | >NC_000009.12:114790970-114791469 |
| | | Homo sapiens chromosome 9 |
| rs10974900 | 2068 | >NC_000009.12:4987458-4987957 |
| | | Homo sapiens chromosome 9 |
| | | SEQ = [C/T] |
| | | >NC_000009.12:4987959-4988458 |
| | | Homo sapiens chromosome 9 |
| rs12434976 | 2069 | >NC_000014.9:98185370-98185869 |
| | | Homo sapiens chromosome 14 |
| | | SEQ = [A/C] |
| | | >NC_000014.9:98185871-98186370 |
| | | Homo sapiens chromosome 14 |
| rs16901748 | 2070 | >NC_000005.10:11561609-11562108 |
| | | Homo sapiens chromosome 5 |
| | | SEQ = [G/T] |
| | | >NC_000005.10:11562110-11562609 |
| | | Homo sapiens chromosome 5 |
| rs2815844 | 2071 | >NC_000001.11:241083704-241084203 |
| | | Homo sapiens chromosome 1 |
| | | SEQ = [C/T] |
| | | >NC_000001.11:241084205-241084704 |
| | | Homo sapiens chromosome 1 |
| rs889702 | 2072 | >NC_000016.10:6088639-6089138 |
| | | Homo sapiens chromosome 16 |
| | | SEQ = [G/A] |
| | | >NC_000016.10:6089140-6089639 |
| | | Homo sapiens chromosome 16 |
| rs2409750 | 2073 | >NC_000008.11:11229685-11230184 |
| | | Homo sapiens chromosome 8 |
| | | SEQ = [A/C] |
| | | >NC_000008.11:11230186-11230685 |
| | | Homo sapiens chromosome 8 |
| rs1541020 | 2074 | >NC_000010.11:6122567-6123066 |
| | | Homo sapiens chromosome 10 |
| | | SEQ = [C/T] |
| | | >NC_000010.11:6123068-6123567 |
| | | Homo sapiens chromosome 10 |
| rs4942248 | 2075 | >NC_000013.11:43832169-43832668 |
| | | Homo sapiens chromosome 13 |
| | | SEQ = [T/A] |
| | | >NC_000013.11:43832670-43833169 |
| | | Homo sapiens chromosome 13 |
| rs12934476 | 2076 | >NC_000016.10:11237152-11237651 |
| | | Homo sapiens chromosome 16 |
| | | SEQ = [A/G] |
| | | >NC_000016.10:11237653-11238152 |
| | | Homo sapiens chromosome 16 |
| rs12457255 | 2077 | >NC_000018.10:12759477-12759976 |
| | | Homo sapiens chromosome 18 |
| | | SEQ = [C/A] |
| | | >NC_000018.10:12759978-12760477 |
| | | Homo sapiens chromosome 18 |
| rs2297437 | 2078 | >NC_000020.11:63673421-63673920 |
| | | Homo sapiens chromosome 20 |
| | | SEQ = [G/A] |
| | | >NC_000020.11:63673922-63674421 |
| | | Homo sapiens chromosome 20 |
| rs41309367 | 2079 | >NC_000020.11:63677701-63678200 |
| | | Homo sapiens chromosome 20 |
| | | SEQ = [C/T] |
| | | >NC_000020.11:63678202-63678701 |
| | | Homo sapiens chromosome 20 |
| rs10733509 | 2080 | >NC_000009.12:4307550-4308049 |
| | | Homo sapiens chromosome 9 |
| | | SEQ = [A/G] |
| | | >NC_000009.12:4308051-4308550 |
| | | Homo sapiens chromosome 9 |
| rs10750376 | 2081 | >NC_000011.10:127867534-127868033 |
| | | Homo sapiens chromosome 11 |
| | | SEQ = [C/T] |
| | | >NC_000011.10:127868035-127868534 |
| | | Homo sapiens chromosome 11 |
| rs10932456 | 2082 | >NC_000002.12:212988031-212988530 |
| | | Homo sapiens chromosome 2 |
| | | SEQ = [A/G] |
| | | >NC_000002.12:212988532-212989031 |
| | | Homo sapiens chromosome 2 |
| rs1326860 | 2083 | >NC_000001.11:193834579-193835078 |
| | | Homo sapiens chromosome 1 |
| | | SEQ = [A/G] |
| | | >NC_000001.11:193835080-193835579 |
| | | Homo sapiens chromosome 1 |
| rs1528663 | 2084 | >NC_000011.10:13945175-13945674 |
| | | Homo sapiens chromosome 11 |
| | | SEQ = [G/A] |
| | | >NC_000011.10:13945676-13946175 |
| | | Homo sapiens chromosome 11 |
| rs1892231 | 2085 | >NC_000014.9:98267730-98268229 |
| | | Homo sapiens chromosome 14 |
| | | SEQ = [A/C] |
| | | >NC_000014.9:9826823 1-98268730 |
| | | Homo sapiens chromosome 14 |
| rs951279 | 2086 | >NC_000001.11:208593050-208593549 |
| | | Homo sapiens chromosome 1 |
| | | SEQ = [A/G] |
| | | >NC_000001.11:208593551-208594050 |
| | | Homo sapiens chromosome 1 |
| rs9806914 | 2087 | >NC_000016.10:6097144-6097643 |
| | | Homo sapiens chromosome 16 |
| | | SEQ = [A/C/G/T] |
| | | >NC_000016.10:6097645-6098144 |
| | | Homo sapiens chromosome 16 |
| rs7935393 | 2088 | >NC_000011.10:128572704-128573203 |
| | | Homo sapiens chromosome 11 |
| | | SEQ = [A/C] |
| | | >NC_000011.10:128573205-128573704 |
| | | Homo sapiens chromosome 11 |
| rs1690492 | 2089 | >NC_000016.10:11224459-11224958 |
| | | Homo sapiens chromosome 16 |
| | | SEQ = [G/C] |
| | | >NC_000016.10:11224960-11225459 |
| | | Homo sapiens chromosome 16 |
| rs420726 | 2090 | >NC_000021.9:44239062-44239561 |
| | | Homo sapiens chromosome 21 |
| | | SEQ = [T/C] |
| | | >NC_000021.9:44239563-44240062 |
| | | Homo sapiens chromosome 21 |
| rs7759385 | 2091 | >NC_000006.12:106140395-106140894 |
| | | Homo sapiens chromosome 6 |
| | | SEQ = [T/A] |
| | | >NC_000006.12:106140896-106141395 |
| | | Homo sapiens chromosome 6 |
| rs10974900 | 2092 | >NC_000009.12:4987458-4987957 |
| | | Homo sapiens chromosome 9 |
| | | SEQ = [C/T] |
| | | >NC_000009.12:4987959-4988458 |
| | | Homo sapiens chromosome 9 |
| rs1326860 | 2093 | >NC_000001.11:193834579-193835078 |
| | | Homo sapiens chromosome 1 |
| | | SEQ = [A/G] |
| | | >NC_000001.11:193835080-193835579 |
| | | Homo sapiens chromosome 1 |
| rs2548147 | 2094 | >NC_000005.10:40151459-40151958 |
| | | Homo sapiens chromosome 5 |
| | | SEQ = [G/C] |
| | | >NC_000005.10:40151960-40152459 |
| | | Homo sapiens chromosome 5 |
| rs2815844 | 2095 | >NC_000001.11:241083704-241084203 |
| | | Homo sapiens chromosome 1 |
| | | SEQ = [C/T] |
| | | >NC_000001.11:241084205-241084704 |
| | | Homo sapiens chromosome 1 |
| rs889702 | 2096 | >NC_000016.10:6088639-6089138 |
| | | Homo sapiens chromosome 16 |
| | | SEQ = [G/A] |
| | | >NC_000016.10:6089140-6089639 |
| | | Homo sapiens chromosome 16 |
| rs9806914 | 2097 | >NC_000016.10:6097144-6097643 |
| | | Homo sapiens chromosome 16 |
| | | SEQ = [A/C/G/T] |
| | | >NC_000016.10:6097645-6098144 |
| | | Homo sapiens chromosome 16 |
| rs6478109 | 2098 | >NC_000009.12:114805986-114806485 |
| | | Homo sapiens chromosome 9 |
| | | SEQ = [A/G] |
| | | >NC_000009.12:114806487-114806986 |
| | | Homo sapiens chromosome 9 |
| rs7278257 | 2099 | >NC_000021.9:44233381-44233880 |
| | | Homo sapiens chromosome 21 |
| | | SEQ = [G/C] |
| | | >NC_000021.9:44233882-4423438 1 |
| | | Homo sapiens chromosome 21 |
| rs11221332 | 2100 | >NC_000011.10:128510579-128511078 |
| | | Homo sapiens chromosome 11 |
| | | SEQ = [C/A/T] |
| | | >NC_000011.10:128511080-128511579 |
| | | Homo sapiens chromosome 11 |
| rs56124762 | 2101 | >NC_000021.9:44238091-44238590 |
| | | Homo sapiens chromosome 21 |
| | | SEQ = [A/G] |
| | | >NC_000021.9:44238592-44239091 |
| | | Homo sapiens chromosome 21 |
| rs2070558 | 2102 | >NC_000021.9:44235275-44235774 |
| | | Homo sapiens chromosome 21 |
| | | SEQ = [G/A] |
| | | >NC_000021.9:44235776-44236275 |
| | | Homo sapiens chromosome 21 |
| rs2070561 | 2103 | >NC_000021.9:44237587-44238086 |
| | | Homo sapiens chromosome 21 |
| | | SEQ = [T/C] |
| | | >NC_000021.9:44238088-44238587 |
| | | Homo sapiens chromosome 21 |
| rs7134599 | 2104 | >NC_000012.12:68105795-68106294 |
| | | Homo sapiens chromosome 12 |
| | | SEQ = [G/A] |
| | | >NC_000012.12:68106296-68106795 |
| | | Homo sapiens chromosome 12 |
| rs6062496 | 2105 | >NC_000020.11:63697246-63697745 |
| | | Homo sapiens chromosome 20 |
| | | SEQ = [G/A] |
| | | >NC_000020.11:63697747-63698246 |
| | | Homo sapiens chromosome 20 |
| rs7468800 | 2106 | >NC_000009.12:114829225-114829724 |
| | | Homo sapiens chromosome 9 |
| | | SEQ = [C/A] |
| | | >NC_000009.12:114829726-114830225 |
| | | Homo sapiens chromosome 9 |
| rs1569328 | 2107 | >NC_000014.9:75274548-75275047 |
| | | Homo sapiens chromosome 14 |
| | | SEQ = [C/T] |
| | | >NC_000014.9:75275049-75275548 |
| | | Homo sapiens chromosome 14 |
| rs2284553 | 2108 | >NC_000021.9:33403889-33404388 |
| | | Homo sapiens chromosome 21 |
| | | SEQ = [A/G] |
| | | >NC_000021.9:33404390-33404889 |
| | | Homo sapiens chromosome 21 |
| rs6062504 | 364157 | >NC_000020.11:63717055-63717554 |
| | | Homo sapiens chromosome 20 |
| | | SEQ = [A/G/T] |
| | | >NC_000020.11:63717556-63718055 |
| | | Homo sapiens chromosome 20 |
| rs7556897 | 364158 | >NC_000002.12:227794896-227795395 |
| | | Homo sapiens chromosome 2 |
| | | SEQ = [C/G/A/T] |
| | | >NC_000002.12:227795397-227795896 |
| | | Homo sapiens chromosome 2 |

### Example 6. Validation of 3-SNP Models for TL1A Companion Diagnostic

[1672] The machine learning workflow identified several SNP model combinations for the development of the TL1A companion diagnostic (TL1A CDx). Previous analyses had identified 3-SNP combination models composed of variants associated with TNFSF15 (rs6478109), ICOSLG (rs7278257, rs2070557), ETS1 (rs7935393), and RBFOX1 (rs9806914) genes as well as variant rs1892231. These SNP models were identified via a Cedars Sinai Crohn's Disease cohort. In order to validate the findings, an external cohort of Crohn's Disease patients was identified and genotyped. Genotype and TL1A protein expression were obtained from the non-Cedars cohort in order to validate the 3-SNP models. A total of 712 Crohn's Disease individuals were genotyped while a 114 subset of the 712 samples were used to obtain TL1A protein expression via PBMC assays.

### Genotyping and Imputation of Cohort

[1673] The initial data mining analyses was performed on a Cedars Sinai cohort using genotypes from the Illumina's ICHIP (Immunochip) platform. The validation cohort was genotyped using Illumina's GSA platform (24v2.0), which has substantial improvements over the Immunochip platform. Most of the SNPs identified in the models were not present on the GSA platform. Therefore, imputation of the GSA genotype data was initiated in order to obtain a larger panel of genotyped SNPs so the SNP models could be validated. Genotype imputation refers to the prediction of genotypes that are not directly assayed on a given platform. Different methodologies and significant improvements in algorithms have been developed for implementing genotype imputation. The quality of the genotype imputation was validated by selecting a random sample of 120 patients from our validation cohort to be genotyped fora small set of imputed SNPs. The overall agreement between imputed genotype and assay genotypes were evaluated using Cohen's Kappa statistic.

[1674] Validation cohort genotyped results were downloaded from Illumina and transformed into PED format (through Illumina's Genome Studio Workbench) so that they could be further processed using the PLINK software (v1.9). The genotyped data went through a process of QC looking at factors such as heterozygosity, SNP missingness, MAF distributions, and relatedness of samples in order to prepare the genotype data for ancestry determination. Once genotyped data was QCed, the admixture and ancestry PCA plots were used to determine which samples were of European (EUR) ancestry to move forward with imputation. In order to perform imputation, ancestry needs to be taken into account, since genotype reference panels based on ancestry are used by imputation algorithms. For our imputation, the European Reference Panel: hrc.r1.1 for the reference panel was selected. All qc′d EUR ancestry genotyped samples were submitted to the Michigan Imputation Server for genotype imputation. The resulting imputed genotypes were downloaded and further processed for model validation.

[1675] In order to move forward with analyzing the imputed genotypes for the 3-SNP model validation, a random selection of 120 samples from the initial 470 samples were sent to Illumina for genotyping in order to compare the imputed genotype with the actual laboratory genotype results. The imputed genotypes were evaluated by looking at the level of agreement for the following SNPs: rs6478109, rs2070557, rs1892231, rs7935393.

[1676] The SNP rs6478109 was already on the GSA platform and this was used as a “control” to determine that the assay was in fact working appropriately. The levels of agreement (based on Cohen's Kappa) were high (based on the table below) and therefore it was decided to move forward with using the imputed genotype data for further analysis.

TABLE 6
Levels of Agreement Based On Cohen's Kappa

| SNP | Rsq | Cohen's Kappa |
|---|---|---|
| rs6478109 | 0.998 | 1.00 |
| rs2070557 | 0.978 | 0.98 |
| rs1892231 | 0.989 | 1.00 |
| rs7935393 | 0.980 | 1.00 |

### Evaluation and Validation of 3-SNP Models

[1677] Next, the initial 3-SNP models were evaluated using the validation cohort. Similar to the analysis of the Cedars cohort TL1A protein expression data, the TL1A Expression (based on PBMC assay) from the validation cohort was clustered using the TL1A measurements at the 0, 3, 6, 24, and 72 hour time points. The clustering identified 3 cluster within the dataset, which are provided in FIG. 5A-5C. FIG. 5A shows cluster 1, FIG. 5B shows cluster 2, and FIG. 5C shows cluster 3.

[1678] The 3 clusters were collapsed into 2 clusters (high expression clusters) and (low expression clusters), which are shown in FIG. 6. The clusters above were collapsed down to two clusters because there was substantial overlap between cluster 3 (FIG. 5C) above and cluster 1 (FIG. 6, left). The same level of overlap was seen for clusters 1 (FIG. 5A) and 2 (FIG. 5B) (based on the 3 clusters) and cluster 2 (FIG. 6, right).

[1679] The imputed genotype data were integrated from the validation cohort with the TL1A protein expression data in order to determine which models validated in the external validation cohort. This was done by looking at results of the TL1A CDx 3-SNP model. The 3-SNP models were evaluated in the context of the validation cohort and the TL1A expression clusters. “Positive” genotype hits were determined based on the association of a particular genotype and its ability to associate with the higher expressing TL1A cluster. Without being bound by any particular theory, high TL1A clusters (e.g., high expression of TL1A in CD patients, relative to baseline expression of TL1A in normal individuals) directly correlates with positive therapeutic responsiveness to an inhibitor of TL1A activity or expression; whereas low TL1A clusters (e.g., low TL1A expression in CD patients, relative to baseline expression of TL1A in normal individuals) directly correlates to non-responsiveness to an inhibitor of TL1A activity or expression.

[1680] Calculations of Positive Predictive Value (PPV) and Specificity were calculated for the 3-SNP models. Each model consists of 3 unique SNPs based off of the identified SNPs in our training cohort analysis (TNFSF15 (rs6478109), ICOSLG (rs7278257, rs2070557), ETS1 (rs7935393), and RBFOX1 (rs9806914) genes as well as variant rs1892231). The PPV and Specificity for Models A-C are provided in Table 7. As shown in Table 7, Model A may be used to predict a positive therapeutic response to a treatment with an inhibitor of TL1A activity or expression with a PPV of at least or about 0.797 and a specificity of at least or about 0816 (when considering both training and validation cohorts combined). Model A was further explored due to its better performance compared to Models B and C (when considering both training and validation cohorts combined).

TABLE 7
Exemplary 3-SNP Models A-C

| | Training | | Validation | | | | |
|---|---|---|---|---|---|---|---|
| | Cohort | | Cohort | | Combined | | CD |
| Model | PPV | SPEC | PPV | SPEC | PPV | SPEC | FREQ |
| A | 0.902 | 0.867 | 0.643 | 0.783 | 0.797 | 0.816 | 38.7 |
| B | 0.806 | 0.767 | 0.682 | 0.848 | 0.759 | 0.816 | 26.3 |
| C | 0.838 | 0.800 | 0.576 | 0.696 | 0.714 | 0.737 | 36.7 |

[1681] Other previously identified 3-SNP models were further evaluated due the fact that only Model A showed strong concordance of positive hit genotypes across the training and validation cohorts. These additional SNP models (Models D-K) consisted of 3-SNP combinations of the following SNPs: rs6478109, rs7935393, rs9806914, rs16901748, rs2070557, rs7278257, rs2297437, rs1892231, as shown in Table 8.

TABLE 8
3-SNP Models D-K

| | Cohort | | Cohort | | | | |
|---|---|---|---|---|---|---|---|
| | 1 | | 2 | | Combined | | CD |
| Model | PPV | SPEC | PPV | SPEC | PPV | SPEC | FREQ |
| D | 0.815 | 0.833 | 0.750 | 0.848 | 0.782 | 0.842 | 18.6 |
| E | 0.848 | 0.833 | 0.606 | 0.717 | 0.727 | 0.763 | 31.2 |
| F | 0.909 | 0.933 | 0.667 | 0.870 | 0.800 | 0.895 | 18.3 |
| G | 0.917 | 0.933 | 0.609 | 0.804 | 0.766 | 0.855 | 22.6 |
| H | 0.923 | 0.967 | 0.727 | 0.935 | 0.833 | 0.947 | 12.9 |
| I | 0.941 | 0.967 | 0.733 | 0.913 | 0.844 | 0.934 | 17.2 |
| J | 0.923 | 0.967 | 0.727 | 0.935 | 0.833 | 0.947 | 12.9 |
| K | 0.844 | 0.833 | 0.731 | 0.848 | 0.793 | 0.842 | 23.9 |

[1682] As before, the PPV and Specificity for each model was evaluated in the context of positive and negative hits and their association with high and lower TL1A clusters. After evaluating the models across both training and validation cohorts, an additional model (Model K) was evaluated, which contained SNP, rs16901748 (CTNND2), which had not been utilized in our previous models (based on the initial training cohort).

### ICOSLG Proxy SNP Selection

[1683] One of ICOSLG SNPs (rs7278257) was determined to be challenging to genotype given the SNP location within the genome. Therefore, candidate proxy SNPs to rs7278257 were identified. The proxy SNPs were identified via LDLink. A list of potential proxy SNPs for rs7278257 is shown below in Table 9.

TABLE 9
Proxy SNPs Utilized in Validation

| RS | | | | Dis- | | |
|---|---|---|---|---|---|---|
| Number | Coord | Alleles | MAF | tance | Dprime | R2 |
| rs7278257 | chr21: | (G/C) | 0.2833 | 0 | 1 | 1 |
| | 45653764 | | | | | |
| rs56124762 | chr21: | (A/G) | 0.2763 | 4710 | 0.9849 | 0.9372 |
| | 45658474 | | | | | |
| rs11558819 | chr21: | (C/T) | 0.2873 | 3010 | 0.9705 | 0.9236 |
| | 45656774 | | | | | |
| rs2070557 | chr21: | (A/T) | 0.2972 | 1360 | 0.9651 | 0.8705 |
| | 45655124 | | | | | |
| rs2070558 | chr21: | (G/A) | 0.2952 | 1894 | 0.9602 | 0.87 |
| | 45655658 | | | | | |
| rs2329718 | chr21: | (T/C) | 0.2952 | 2435 | 0.9602 | 0.87 |
| | 45656199 | | | | | |
| rs2070559 | chr21: | (C/G) | 0.2982 | 3936 | 0.96 | 0.8573 |
| | 45657700 | | | | | |
| rs2070560 | chr21: | (C/G) | 0.2972 | 4084 | 0.9551 | 0.8526 |
| | 45657848 | | | | | |
| rs2070561 | chr21: | (T/C) | 0.2972 | 4206 | 0.9551 | 0.8526 |
| | 45657970 | | | | | |

[1684] Next, the SNPs provided in Table 9 were analyzed for relevant inflammatory bowel disease related clinical associations within the Cedars R/Shiny database. From the SNPs above, the following SNPs had relevant clinical associations (examples include key phenotypes: CD vs. Ctrl, IBD vs. Ctrl, L1 B2a+B2b vs B1): rs2070561, rs56124762, rs2070558, rs11558819. CD v. Ctrl refers to cases of Crohn's disease versus cases of controls (individuals without Crohn's disease); IBD vs. Ctrl refers to cases of inflammatory bowel disease versus cases of controls (individuals without IBD); L1 refers to the ileum; B2a+B2b refers to stricturing and penetrating disease; B1 refers to non-stricturing and non-penetrating disease.

[1685] The TL1A companion diagnostic (CDx) described herein was validated in two independent CD and UC patient cohorts, the results of which are summarized in FIG. 10. The TL1A CDx captured approximately 32% of the IBD population and predicted with positive predictive value (PPV) of 86% whether the CD or the UC subjects were positive for a therapeutic response to TL1A (“CDx+”). Overall, the TL1A CDx had an approximately 4.6× greater probability of identifying patients predisposed to increased TL1A expression (“high producers”) over IBD patients predisposed to lowered TL1A expression (“low producers”). Across two CD patient cohorts alone, the TL1A CDx predicted as high as 42% of the IBD patients to have increased TL1A expression.

### Example 7. Validation in Japanese Cohort

[1686] An external cohort of Crohn's Disease patients of Japanese ancestry is identified and genotyped. Genotype and TL1A protein expression are obtained from second Japanese cohort in order to validate the 3-SNP models. A total of 800 Crohn's Disease individuals are genotyped while a 100 subset of the 800 samples are used to obtain TL1A protein expression via PBMC assays.

[1687] The initial 3-SNP models are evaluated using the Japanese validation cohort. Similar to the analysis of the validation cohort in Example 6, the TL1A Expression (based on PBMC assay) from the validation cohort is clustered using the TL1A measurements at the 0, 3, 6, 24, and 72 hour time points. The clustering identifies at least 2 clusters in the dataset: (i) high expression clusters and (ii) low expression clusters.

[1688] The imputed genotype data are integrated from the Japanese validation cohort with the TL1A protein expression data in order to determine which models validated in the Japanese validation cohort. This is done by looking at results of the TL1A CDx 3-SNP model. The 3-SNP models are evaluated in the context of the Japanese validation cohort and the TL1A expression clusters. “Positive” genotype hits are determined based on the association of a particular genotype and its ability to associate with the higher expressing TL1A cluster. Calculations of PPV and Specificity are calculated for the 3-SNP models. Each model consists of 3 unique SNPs based off of the identified SNPs in the training cohort analysis (TNFSF15 (rs6478109), ICOSLG (rs7278257, rs2070557), ETS1 (rs7935393), and RBFOX1 (rs9806914) genes as well as variant rs1892231). The 3-SNP models shown in Table 7 and Table 8 are explored in this validation. The PPV and SPEC values expected in the Japanese validation cohort for Models A-K are the same as those reported in Table 7 and op. Without being bound by any particular theory, validation of the 3-SNP models for the TL1A CDx is expected across all ancestral populations.

[1689] Candidate proxy SNPs to any one of the SNPs provided in Table 7 or Table 8 may be identified. The proxy SNPs are identified via LDLink using a reference population of Japanese ancestry. The proxy SNPs are further analyzed for relevant inflammatory bowel disease related clinical associations within the Cedars R/Shiny database in Japanese cohorts, such as for example, CD vs. Ctrl, IBD vs. Ctrl, L1 B2a+B2b vs B1).

### Example 8: Design of Humanized Anti-TL1A Antibodies

[1690] Two different strategies were employed to identify humanized variants that express well in mammalian cells, preserve TL1A binding, and display high monomeric content.

[1691] The first strategy utilized a previously humanized variant, termed ASX, that displays high monomeric content (98%) and expresses well (30 μg/mL in small-scale transient cultures) as a template for additional mutagenesis. However, ASX contains a significant number of murine framework residues, eight heavy chain residues and 7 light chain residues, that may pose an immunogenicity risk. The ASX heavy and light chain templates were used to systematically mutate murine framework residues to human residues corresponding to the most closely related human germline framework. The goal of this strategy was to reduce the total number of murine framework residues while preserving the favorable expression and solubility characteristics of ASX. Because ASX contained 15 murine framework residues there were 2\hat{ }15 (32,768) distinct variants (restricting each position to either the murine or the human residue) that could be made and tested.

[1692] The second strategy utilized a previously humanized variant, termed c34, that expresses well (17 μg/mL in small-scale transient cultures) and contains CDRs optimized for binding within a fully human germline framework, as a template for additional mutagenesis. Large-scale expression of c34 unexpectedly resulted in a sub-optimal monomeric content (55-60%). The c34 heavy and light chain templates were used to systematically mutate certain framework residues to murine residues corresponding to the original murine antibody framework. The goal of this strategy was to improve the solubility of c34 (monomeric content) through the introduction of as few murine framework residues as possible (minimizing potential immunogenicity risks) while preserving the favorable expression characteristics of c34.

[1693] For both strategies, the initial approach was to scan differing framework residues, one at a time, and express and characterize the variants. Thus, human framework residues were introduced into variant ASX where tt differed from c34 and conversely, murine framework mutations were introduced into variant c34 where tt differed from ASX. The initial scan identified certain framework and CDR residues that had minimal impact on the characteristics displayed by the template antibody while other mutations had a more dramatic impact, favorable in some cases and unfavorable in others. The information gained from the positional scan was subsequently used in an iterative and combinatorial fashion, to identify multiple variants with favorable characteristics. Importantly, by applying a stepwise, iterative and combinatorial approach the beneficial variants were identified without necessitating the expression and characterization of 32,768 distinct variants.

[1694] In certain cases, mutation of the first residue of the heavy chain from glutamine to aspartic acid or glutamic acid was evaluated, alone or in combination with other mutations.

[1695] In addition, for both strategies certain CDR residues were also mutated to determine the impact on expression and solubility. For example, a limited number of mutations in HCDR2, HCDR3 and LCDR3 were examined. Similar to the approach used with frameworks, the mutations were predominantly restricted to the original murine CDR residue or mutations that were previously identified as enhancing binding affinity.

[1696] Finally, for both strategies “shuffling” of heavy and light chains was used. Specifically, certain human light chains containing few murine framework residues and having a favorable impact on expression of antibody with higher monomeric content were identified early in the process and these were paired with various engineered heavy chains in order to accelerate the process of identifying suitable variants.

TABLE 10
Sequences of Certain Designed anti-TL1A Antibodies

| | Heavy Chain Variable Region | Light Chain Variable Region |
|---|---|---|
| Antibody | SEQ ID NO | SEQ ID NOS |
| A15 | 108 | 203 |
| A29 | 108 | 205 |
| A30 | 108 | 204 |
| A31 | 136 | 205 |
| A32 | 137 | 205 |
| A33 | 137 | 202 |
| A34 | 107 | 208 |
| A35 | 138 | 208 |
| A36 | 139 | 208 |
| A37 | 140 | 208 |
| A38 | 141 | 208 |
| A39 | 142 | 208 |
| A40 | 143 | 208 |
| A41 | 115 | 208 |
| A42 | 144 | 208 |
| A43 | 145 | 208 |
| A44 | 146 | 208 |
| A45 | 120 | 208 |
| A46 | 147 | 208 |
| A47 | 148 | 208 |
| A48 | 108 | 210 |
| A49 | 108 | 211 |
| A50 | 108 | 212 |
| A51 | 108 | 213 |
| A52 | 108 | 214 |
| A53 | 146 | 208 |
| A54 | 149 | 208 |
| A55 | 109 | 208 |
| A56 | 108 | 215 |
| A57 | 150 | 202 |
| A58 | 125 | 202 |
| A59 | 117 | 202 |
| A60 | 151 | 202 |
| A61 | 152 | 202 |
| A62 | 153 | 202 |
| A63 | 154 | 202 |
| A64 | 121 | 202 |
| A65 | 128 | 202 |
| A66 | 155 | 202 |
| A67 | 122 | 202 |
| A68 | 123 | 202 |
| A69 | 156 | 202 |
| A70 | 157 | 202 |
| A71 | 158 | 202 |
| A72 | 131 | 202 |
| A73 | 157 | 205 |
| A74 | 158 | 205 |
| A75 | 131 | 205 |
| A76 | 159 | 202 |
| A77 | 160 | 202 |
| A78 | 124 | 202 |
| A79 | 107 | 208 |
| A81 | 139 | 208 |
| A82 | 140 | 208 |
| A83 | 144 | 208 |
| A85 | 136 | 209 |
| A86 | 136 | 216 |
| A87 | 136 | 217 |
| A88 | 136 | 218 |
| A89 | 136 | 219 |
| A90 | 136 | 220 |
| A91 | 133 | 202 |
| A92 | 161 | 202 |
| A93 | 162 | 202 |
| A94 | 124 | 202 |
| A95 | 131 | 205 |
| A96 | 128 | 205 |
| A97 | 121 | 202 |
| A98 | 122 | 202 |
| A99 | 123 | 202 |
| A100 | 107 | 204 |
| A101 | 140 | 204 |
| A102 | 115 | 204 |
| A103 | 120 | 204 |
| A104 | 139 | 204 |
| A105 | 143 | 204 |
| A107 | 108 | 202 |
| A108 | 156 | 205 |
| A109 | 133 | 205 |
| A110 | 125 | 205 |
| A111 | 150 | 205 |
| A112 | 117 | 205 |
| A113 | 124 | 205 |
| A114 | 121 | 205 |
| A115 | 122 | 205 |
| A116 | 123 | 205 |
| A117 | 151 | 205 |
| A118 | 153 | 205 |
| A119 | 159 | 205 |
| A120 | 154 | 205 |
| A121 | 163 | 204 |
| A122 | 113 | 204 |
| A123 | 112 | 204 |
| A124 | 164 | 204 |
| A125 | 105 | 204 |
| A126 | 114 | 204 |
| A127 | 118 | 204 |
| A128 | 111 | 204 |
| A129 | 110 | 204 |
| A130 | 121 | 205 |
| A132 | 128 | 206 |
| A133 | 121 | 206 |
| A134 | 122 | 206 |
| A135 | 133 | 206 |
| A136 | 125 | 206 |
| A137 | 121 | 207 |
| A138 | 122 | 207 |
| A139 | 110 | 207 |
| A140 | 110 | 202 |
| A141 | 111 | 207 |
| A142 | 111 | 202 |
| A143 | 136 | 202 |
| A144 | 111 | 204 |
| A145 | 133 | 201 |
| A146 | 125 | 201 |
| A147 | 117 | 201 |
| A148 | 121 | 201 |
| A149 | 122 | 201 |
| A150 | 128 | 201 |
| A151 | 124 | 201 |
| A152 | 131 | 201 |
| A153 | 133 | 205 |
| A154 | 125 | 205 |
| A155 | 121 | 205 |
| A156 | 122 | 205 |
| A157 | 104 | 204 |
| A158 | 101 | 204 |
| A159 | 119 | 204 |
| A160 | 102 | 204 |
| A161 | 165 | 204 |
| A162 | 106 | 204 |
| A163 | 166 | 204 |
| A164 | 167 | 204 |
| A165 | 139 | 205 |
| A166 | 146 | 205 |
| A167 | 120 | 205 |
| A168 | 147 | 205 |
| A169 | 126 | 205 |
| A170 | 135 | 205 |
| A171 | 168 | 205 |
| A172 | 130 | 205 |
| A173 | 127 | 205 |
| A174 | 132 | 205 |
| A175 | 126 | 201 |
| A176 | 135 | 201 |
| A177 | 168 | 201 |
| A178 | 130 | 201 |
| A179 | 127 | 201 |
| A180 | 132 | 201 |
| A181 | 107 | 202 |
| A182 | 138 | 202 |
| A183 | 140 | 202 |
| A184 | 145 | 202 |
| A185 | 147 | 202 |
| A186 | 144 | 202 |
| A187 | 120 | 202 |
| A188 | 115 | 202 |
| A189 | 146 | 202 |
| A190 | 141 | 202 |
| A191 | 142 | 202 |
| A192 | 143 | 202 |
| A193 | 109 | 205 |
| A194 | 103 | 205 |
| A195 | 169 | 205 |
| A196 | 129 | 205 |
| A197 | 116 | 205 |
| A198 | 134 | 205 |
| A199 | 109 | 201 |
| A200 | 103 | 201 |
| A201 | 169 | 201 |
| A202 | 129 | 201 |
| A203 | 116 | 201 |
| A204 | 134 | 201 |
| A205 | 109 | 202 |
| A206 | 103 | 202 |
| A207 | 169 | 202 |
| A208 | 129 | 202 |
| A209 | 116 | 202 |
| A210 | 134 | 202 |
| A211 | 108 | 201 |
| A212 | 107 | 201 |
| A213 | 106 | 201 |
| A214 | 111 | 201 |
| A215 | 110 | 201 |
| A216 | 112 | 201 |
| A217 | 101 | 201 |
| A218 | 119 | 201 |
| A219 | 104 | 201 |
| A220 | 102 | 205 |
| A221 | 105 | 201 |
| A222 | 114 | 201 |
| A223 | 103 | 202 |
| A224 | 116 | 201 |
| A500 | 301 | 303 |
| A501 | 302 | 303 |

[1697] As used herein, reference to A (number), refers to an antibody of this table. For instance, A15 used herein refers to A15 in Table 10.

### Example 9: Generation and Characterization of Humanized Anti-tl1a Antibodies

[1698] Humanized anti-TL1A antibodies designed in Example 1 were prepared and characterized.

### Cloning of Humanized Antibodies

[1699] DNA encoding leader sequence and the heavy and light chain variable regions of humanized variants of interest was cloned into pFuse1-hIgG1-Fc1 (InvivoGen) and pFuse2-CLig-hk (InvivoGen), respectively. Two distinct humanized heavy chain templates, termed ASX-HC and c34-HC, and four distinct humanized light chain templates, termed ASX-LC, cH3-1, c34-LC, cXL3-13-LC and cXL3-15-LC were all cloned.

[1700] In order to introduce mutations into the templates, the QuickChange Site Directed Mutagenesis Kit (Agilent, cat. #200518) was used per manufacturer's directions. Briefly, mutagenesis was performed using miniprep double-stranded plasmid DNA, two synthetic oligonucleotides primers containing the desired mutation, PfuTurbo® DNA polymerase and a temperature cycler. Following temperature cycling, the product was treated with Dpn I. The nicked vector DNA containing the mutation(s) of interest was used to transform bacteria. Subsequently, colonies were picked, the DNA was sequenced to confirm mutagenesis and was subsequently used for transfection of mammalian FreeStyle 293-F cells.

### Antibody Expression

[1701] Small-scale (3 mL, 6-well) expression of variants in FreeStyle 293-F cells was performed in the following manner. One or two days prior to transfection cells were passaged so that the density would be >1×10⁶ cells/mL on the day of the transfection. Typically, this meant passaging at 6-7×105 cells/mL one day prior or 4×105 cells/mL two days prior. Transfections were only performed with cell viability>90%. On the day of the transfection Opti-MEM media was warmed to 37° C. and cells were resuspended to 1.1×106 cells/mL, using 3.3×106 cells per 3 mL transfection. A total of 3 ug DNA was used for each transfection. Briefly, the transfections used heavy and light chain plasmid at a heavy chain:light chain ratio of 1:3. For 3 mL transfections, 4 uL 293fectin was added to 96 uL Opti-MEM, combined with 100 uL DNA mixture, and incubated at 25° C. for 20-30 minutes. Subsequently, this mixture was added dropwise to 2.8 mL cells and the plate was transferred to an incubator and placed on a rotating platform at 175 rpm for up to 120 hours. After 96-120 hours, transfection supernatants were collected by centrifuging the transfected cells and supernatant at 1200 rpm for 5 min. The supernatant was transferred to a clean tube and centrifuged again at 3900 rpm for 10 min to remove any remaining cell debris. The supernatant was filtered through a 0.45 mm PES syringe filter and stored at 4° C. until the next step.

### Quantitation of Antibody Expression

[1702] Antibody expression was quantitated by ELISA. Briefly, a Corning Costar 3366 96-well round bottom high bind plate was coated with 50 mL anti-kappa (2 μg/mL) in PBS overnight at 4° C. The plate was washed 3× with PBS-0.05% Tween 20 (PBS-T) and was blocked with 100 μL 1% BSA/PBS for 1 h at 25° C. The block was removed, and culture supernatant diluted 5-fold was added and serially diluted 2-fold across the plate. Every plate also contained an IgG standard diluted serially 3-fold beginning at 1 ug/mL. Samples were incubated for 1 h at 25° C., the plate was washed three times with PBS-T, and 50 uL anti-Fc HRP secondary (Southern Biotech #2048-05), diluted 1:4000 in BSA/PBS was added for 1 h at 25° C. The plate was washed three times with PBS-T and developed for up to 15 min following the addition of 50 μL Ultra TMB ELISA substrate (Thermo #34028). The reaction was terminated by the addition of 50 μL 2 N H₂SO₄ and the A450 nm was measured. Antibody expression levels obtained from 3 mL scale transfections are shown in Table 11.

TABLE 11
Expression, Binding, and Analytical SEC Characterization
of anti-TL1A Antibodies (ND, not determined)

| | | | | | HC | LC |
|---|---|---|---|---|---|---|
| | Expression | KD | % | Murine | Tem- | Tem- |
| Variant | (ug/mL) | (pM) | Monomer | FR | plate | plate |
| 15 | 21 | ND | 87 | 8 | ASX | cH3-1 |
| 29 | 18 | 65 | 65 | 10 | ASX | c34 |
| 30 | 29 | 77 | 90 | 8 | ASX | cXL3-13 |
| 31 | 11 | 92 | 73 | 2 | c34 | c34 |
| 32 | 10 | 111 | 78 | 2 + D | c34 | c34 |
| 33 | 21 | 81 | 54 | 0 + D | c34 | c34 |
| 34 | 35 | <50 | 97 | 14 | ASX | ASX |
| 35 | 36 | 72 | 91 | 14 | ASX | ASX |
| 36 | 40 | <50 | 87 | 13 | ASX | ASX |
| 37 | 40 | 34 | 95 | 14 | ASX | ASX |
| 38 | 28 | 103 | 75 | 14 | ASX | ASX |
| 39 | 15 | 125 | 83 | 14 | ASX | ASX |
| 40 | 30 | <50 | 87 | 13 | ASX | ASX |
| 41 | 20 | 16 | 96 | 14 | ASX | ASX |
| 42 | 30 | <50 | 88 | 14 | ASX | ASX |
| 43 | 18 | 51 | 90 | 14 | ASX | ASX |
| 44 | ND | ND | ND | 13 | ASX | ASX |
| 45 | 15 | 85 | 90 | 13 | ASX | ASX |
| 46 | 27 | 63 | 72 | 13 | ASX | ASX |
| 47 | 18 | 82 | 78 | 12 | ASX | ASX |
| 48 | 22 | 76 | 92 | 14 | ASX | ASX |
| 49 | 26 | 92 | 65 | 13 | ASX | ASX |
| 50 | 33 | 19 | 94 | 14 | ASX | ASX |
| 51 | 16 | <50 | 93 | 14 | ASX | ASX |
| 52 | 29 | 27 | 91 | 13 | ASX | ASX |
| 53 | 26 | 126 | 84 | 13 | ASX | ASX |
| 54 | 25 | 83 | 94 | 15 + D | ASX | ASX |
| 55 | 22 | 91 | 99 | 15 + E | ASX | ASX |
| 56 | 15 | 116 | 71 | 14 | ASX | ASX |
| 57 | 20 | 191 | 59 | 1 | c34 | c34 |
| 58 | 9 | 112 | 67 | 1 | c34 | c34 |
| 59 | 11 | 136 | 78 | 2 | c34 | c34 |
| 60 | 19 | 168 | 57 | 0 | c34 | c34 |
| 61 | 15 | 127 | 44 | 1 | c34 | c34 |
| 62 | 21 | 150 | 58 | 1 | c34 | c34 |
| 63 | 20 | 132 | 52 | 0 | c34 | c34 |
| 64 | 2 | 90 | 97 | 0 | c34 | c34 |
| 65 | 7 | 97 | 69 | 1 | c34 | c34 |
| 66 | 19 | 150 | 49 | 1 | c34 | c34 |
| 67 | 4 | 89 | 97 | 1 | c34 | c34 |
| 68 | 2 | 74 | 92 | 1 | c34 | c34 |
| 69 | 12 | 136 | 64 | 0 + E | c34 | c34 |
| 70 | 15 | 149 | 54 | 1 | c34 | c34 |
| 71 | 18 | 150 | 55 | 2 | c34 | c34 |
| 72 | 13 | 159 | 61 | 3 | c34 | c34 |
| 73 | 8 | 128 | 71 | 3 | c34 | c34 |
| 74 | 10 | 141 | 70 | 4 | c34 | c34 |
| 75 | 8 | 259 | 95 | 5 | c34 | c34 |
| 76 | 19 | ND | 50 | 0 | c34 | c34 |
| 77 | 12 | ND | 50 | 2 | c34 | c34 |
| 78 | 3 | ND | 86 | 2 | c34 | c34 |
| 79 | 42 | ND | 98 | 14 | ASX | ASX |
| 81 | 31 | ND | 88 | 13 | ASX | ASX |
| 82 | 26 | ND | 92 | 14 | ASX | ASX |
| 83 | 29 | ND | 74 | 14 | ASX | ASX |
| 85 | 25 | 130 | 49 | 1 | c34 | c34 |
| 86 | 26 | 129 | 55 | 1 | c34 | c34 |
| 87 | 26 | 121 | 52 | 1 | c34 | c34 |
| 88 | 9 | 81 | 63 | 2 | c34 | c34 |
| 89 | 31 | 117 | 55 | 1 | c34 | c34 |
| 90 | 19 | 107 | 53 | 1 | c34 | c34 |
| 91 | 14 | 132 | 63 | 1 | c34 | c34 |
| 92 | 20 | 121 | 49 | 1 | c34 | c34 |
| 93 | 12 | 117 | 63 | 2 | c34 | c34 |
| 94 | 5 | 81 | 91 | 2 | c34 | c34 |
| 95 | 13 | 105 | 92 | 5 | c34 | c34 |
| 96 | 7 | 95 | 99 | 3 | c34 | c34 |
| 97 | 2 | 71 | 97 | 0 | c34 | c34 |
| 98 | 7 | 140 | 98 | 1 | c34 | c34 |
| 99 | 3 | 102 | 95 | 1 | c34 | c34 |
| 100 | 39 | 84 | 84 | 7 | ASX | cXL3-13 |
| 101 | 23 | 96 | 81 | 7 | ASX | cXL3-13 |
| 102 | 19 | 104 | 75 | 7 | ASX | cXL3-13 |
| 103 | 11 | 107 | 90 | 6 | ASX | cXL3-13 |
| 104 | 26 | 108 | 70 | 6 | ASX | cXL3-13 |
| 105 | 23 | 110 | 58 | 6 | ASX | cXL3-13 |
| 107 | 55 | 71 | 85 | 8 | ASX | c34 |
| 108 | 9 | 55 | 83 | 2 + E | c34 | c34 |
| 109 | 9 | 50 | 96 | 3 | c34 | c34 |
| 110 | 7 | 56 | 95 | 3 | c34 | c34 |
| 111 | 17 | 68 | 61 | 3 | c34 | c34 |
| 112 | 6 | 54 | 93 | 4 | c34 | c34 |
| 113 | 2 | 50 | 99 | 4 | c34 | c34 |
| 114 | 1 | 51 | 99 | 2 | c34 | c34 |
| 115 | 3 | 58 | 99 | 3 | c34 | c34 |
| 116 | 1 | 53 | 99 | 3 | c34 | c34 |
| 117 | 16 | 94 | 80 | 2 | c34 | c34 |
| 118 | 21 | 83 | 70 | 3 | c34 | c34 |
| 119 | 15 | 87 | 77 | 2 | c34 | c34 |
| 120 | 12 | 85 | 64 | 2 | c34 | c34 |
| 121 | 24 | 106 | 77 | 6 | ASX | cXL3-13 |
| 122 | 22 | 112 | 85 | 6 | ASX | cXL3-13 |
| 123 | 18 | 104 | 76 | 5 | ASX | cXL3-13 |
| 124 | 21 | 91 | 83 | 6 | ASX | cXL3-13 |
| 125 | 10 | 116 | 98 | 6 | ASX | cXL3-13 |
| 126 | 4 | 123 | 99 | 5 | ASX | cXL3-13 |
| 127 | 8 | 70 | 94 | 6 | ASX | cXL3-13 |
| 128 | 17 | 111 | 84 | 4 | ASX | cXL3-13 |
| 129 | 17 | 99 | 92 | 5 | ASX | cXL3-13 |
| 130 | 1 | 75 | 99 | 2 | c34 | c34 |
| 132 | 6 | 62 | 99 | 2 | c34 | cXL3-13 |
| 133 | 1 | 58 | 99 | 1 | c34 | cXL3-13 |
| 134 | 3 | 55 | 99 | 2 | c34 | cXL3-13 |
| 135 | 7 | 56 | 74 | 2 | c34 | cXL3-13 |
| 136 | 6 | 53 | 84 | 2 | c34 | cXL3-13 |
| 137 | 2 | 50 | 96 | 0 | c34 | cXL3-15 |
| 138 | 5 | 69 | 99 | 1 | c34 | cXL3-15 |
| 139 | 35 | 74 | 78 | 5 | ASX | cXL3-15 |
| 140 | 26 | 73 | 75 | 5 | ASX | c34 |
| 141 | 27 | 108 | 81 | 4 | ASX | cXL3-15 |
| 142 | 25 | 126 | 68 | 4 | ASX | c34 |
| 143 | 16 | 85 | 57 | 0 | c34 | c34 |
| 144 | ND | ND | ND | 4 | ASX | cXL3-13 |
| 145 | 20 | 70 | 78 | 2 | c34 | c34 |
| 146 | 25 | 65 | 84 | 2 | c34 | c34 |
| 147 | 26 | 63 | 87 | 3 | c34 | c34 |
| 148 | 2 | 46 | 98 | 1 | c34 | c34 |
| 149 | 7 | 48 | 99 | 2 | c34 | c34 |
| 150 | 15 | 59 | 83 | 2 | c34 | c34 |
| 151 | 5 | 57 | 96 | 3 | c34 | c34 |
| 152 | 36 | 58 | 73 | 4 | c34 | c34 |
| 153 | 9 | 49 | 97 | 3 | c34 | c34 |
| 154 | 8 | 66 | 92 | 3 | c34 | c34 |
| 155 | 1 | 67 | 99 | 2 | c34 | c34 |
| 156 | 2 | 94 | 99 | 3 | c34 | c34 |
| 157 | 6 | 69 | 93 | 4 | ASX | cXL3-13 |
| 158 | 6 | 66 | 91 | 3 | ASX | cXL3-13 |
| 159 | 4 | 69 | 99 | 4 | ASX | cXL3-13 |
| 160 | 7 | 94 | 99 | 4 | ASX | cXL3-13 |
| 161 | 11 | 72 | 59 | 4 | ASX | cXL3-13 |
| 162 | 9 | 75 | 79 | 3 | ASX | cXL3-13 |
| 163 | 22 | 51 | 60 | 4 | ASX | cXL3-13 |
| 164 | 23 | 58 | 61 | 4 | ASX | cXL3-13 |
| 165 | 19 | 59 | 53 | 8 | ASX | c34 |
| 166 | 13 | 57 | 76 | 8 | ASX | c34 |
| 167 | 9 | 42 | 96 | 8 | ASX | c34 |
| 168 | 16 | 62 | 85 | 8 | ASX | c34 |
| 169 | 8 | 47 | 90 | 3 | c34 | c34 |
| 170 | 9 | 49 | 93 | 3 | c34 | c34 |
| 171 | 13 | 50 | 80 | 5 | c34 | c34 |
| 172 | 7 | 40 | 96 | 3 | c34 | c34 |
| 173 | 4 | 40 | 99 | 4 | c34 | c34 |
| 174 | 4 | 43 | 98 | 4 | c34 | c34 |
| 175 | 31 | 45 | 86 | 2 | c34 | c34 |
| 176 | 18 | 48 | 80 | 2 | c34 | c34 |
| 177 | 35 | 52 | 67 | 4 | c34 | c34 |
| 178 | 18 | 43 | 85 | 2 | c34 | c34 |
| 179 | 16 | 79 | 93 | 3 | c34 | c34 |
| 180 | 17 | 58 | 94 | 3 | c34 | c34 |
| 181 | 46 | 60 | 87 | 7 | ASX | c34 |
| 182 | 39 | 67 | 74 | 7 | ASX | c34 |
| 183 | 38 | 65 | 82 | 7 | ASX | c34 |
| 184 | 30 | 61 | 73 | 7 | ASX | c34 |
| 185 | 30 | 56 | 66 | 6 | ASX | c34 |
| 186 | 38 | 67 | 66 | 7 | ASX | c34 |
| 187 | 27 | 56 | 72 | 6 | ASX | c34 |
| 188 | 31 | 63 | 87 | 7 | ASX | c34 |
| 189 | 44 | 76 | 71 | 6 | ASX | c34 |
| 190 | 32 | 57 | 69 | 7 | ASX | c34 |
| 191 | 21 | 57 | 80 | 7 | ASX | c34 |
| 192 | 27 | 55 | 70 | 6 | ASX | c34 |
| 193 | 16 | 55 | 68 | 10 + E | ASX | c34 |
| 194 | 16 | 51 | 87 | 9 + E | ASX | c34 |
| 195 | 12 | 56 | 82 | 5 + E | c34 | c34 |
| 196 | 7 | 54 | 97 | 3 + E | c34 | c34 |
| 197 | 7 | 54 | 97 | 3 + E | c34 | c34 |
| 198 | 9 | 53 | 95 | 3 + E | c34 | c34 |
| 199 | 28 | 50 | 93 | 9 + E | ASX | c34 |
| 200 | 24 | 52 | 99 | 8 + E | ASX | c34 |
| 201 | 25 | 58 | 82 | 4 + E | c34 | c34 |
| 202 | 13 | 59 | 87 | 2 + E | c34 | c34 |
| 203 | 18 | 62 | 89 | 2 + E | c34 | c34 |
| 204 | 11 | 53 | 84 | 2 + E | c34 | c34 |
| 205 | 27 | 55 | 86 | 8 + E | ASX | c34 |
| 206 | 20 | 50 | 98 | 7 + E | ASX | c34 |
| 207 | ND | ND | ND | 3 + E | c34 | c34 |
| 208 | ND | ND | ND | 1 + E | c34 | c34 |
| 209 | 14 | 58 | 66 | 1 + E | c34 | c34 |
| 210 | 15 | 70 | 61 | 1 + E | c34 | c34 |
| 211 | 42 | 58 | 96 | 9 | ASX | c34 |
| 212 | 33 | 50 | 99 | 8 | ASX | c34 |
| 213 | 29 | 49 | 99 | 4 | ASX | c34 |
| 214 | 27 | 51 | 97 | 5 | ASX | c34 |
| 215 | 20 | 48 | 77 | 6 | ASX | c34 |
| 216 | 24 | 49 | 97 | 6 | ASX | c34 |
| 217 | 15 | 43 | 99 | 4 | ASX | c34 |
| 218 | 13 | 51 | 96 | 5 | ASX | c34 |
| 219 | 21 | 50 | 99 | 5 | ASX | c34 |
| 220 | 18 | 50 | 99 | 6 | ASX | c34 |
| 221 | 23 | 51 | 98 | 7 | ASX | c34 |
| 222 | 29 | 60 | 96 | 6 | ASX | c34 |
| 223 | 19 | 62 | 98 | 7 + E | ASX | c34 |
| 224 | 15 | 76 | 92 | 2 + E | c34 | c34 |

### Antibody Binding to Human TL1A

[1703] Antibody binding to human TL1A (Fitzgerald #30R-AT070) was quantitated by ELISA. Briefly, a Corning Costar 3366 96-well round bottom high bind plate was coated with 50 μL TL1A (1 μg/mL) in PBS overnight at 4° C. The plate was washed 3× with PBS-0.05% Tween 20 (PBS-T) and was blocked with 100 μL 1% BSA/PBS for 1 h at 25° C. The block was removed, and culture supernatant diluted 5-fold was added and serially diluted 2-fold across the plate. Samples were incubated for 1 h at 25° C., the plate was washed three times with PBS-T, and 50 μL anti-Fc HRP secondary, diluted 1:4000 in BSA/PBS was added for 1 h at 25° C. The plate was washed three times with PBS-T and developed for up to 15 min following the addition of 50 μL Ultra TMB ELISA substrate. The reaction was terminated by the addition of 50 μL 2 N H₂SO₄ and the A450 nm was measured. The antibody affinities, as determined by ELISA titration against human TL1A using unpurified culture supernatants, is shown in Table 11.

### Purification of Antibodies

[1704] Antibodies were purified from culture supematants in a single step using Dynabeads Protein A (ThermoFisher Scientific, cat. #10002D). First, culture supernatants were concentrated per manufacturer's instructions using an Amicon Ultra-4 Centrifugal Filter Unit (30,000 MWCO; Millipore Sigma, cat. #C7719). The Dynabeads were resuspended by gentle vortexing and 100 uL were transferred to an Eppendorf tube. Using a magnet to retain the beads, the storage buffer was removed, and the beads were washed with 0.5 mL of 20 mM sodium phosphate, 150 mMNaCl, pH 7.4 (EB, Equilibration Buffer). A total of up to 24 ug of IgG from culture supernatant was added to the beads and mixed gently until the beads were resuspended. When necessary, antibody supernatants were diluted with EB. The tubes were placed sideways on a shaking platform and mixed for 10 min at 25° C. at 500 rpm. Subsequently, the beads were collected at the bottom of the tube using a microfuge at 10,000 rpm for 30 sec. Using a magnet to retain the beads, the supernatant was removed. The beads were washed once with 0.5 mL of 20 mM sodium phosphate, 500 mMNaCl, pH 7.4 followed by another wash with 50 mM sodium phosphate, pH 6.0. The beads were collected at the bottom of the tube using a microfuge at 10,000 rpm for 30 sec. Purified antibody was eluted from the beads using 20 uL 50 mM sodium acetate, pH 3.5 with gentle mixing for 2 min at 25° C. Using a magnet to retain the beads, the eluate was transferred to a fresh tube containing 1.1 uL 1 M Tris, pH 8.5 to neutralize the pH of the sample. This sample was then centrifuged at 10,000 rpm for 2 min and transferred to a fresh tube to ensure removal of residual Dynabeads. The concentration of the purified sample was determined using a DeNovix DS-11 Spectrophotometer/Fluorometer, buffer blank, and a mass extinction coefficient of 13.70 at 280 nm for a 1% IgG solution.

### Size Exclusion Chromatography

[1705] The antibodies were analyzed by size exclusion chromatography (SEC) to determine percent monomer and identify any large molecular weight aggregate contaminant species. A total volume of 15 μL of protein A purified antibodies at a concentration of 0.1-1 μg/μL were analyzed using a Waters SEC column (Acquity UPLC BEH SEC, 200 Å, 1.7 μm, 4.6×150 mm) on a Shimadzu UPLC instrument at a flow rate of 0.2 mL/min and a column oven temperature of 30° C. Standard PBS was used as the mobile phase and absorbance at 280 nm was used to monitor protein elution. For some antibody clones tested that demonstrated non-symmetrical elution profiles, PBS buffer supplemented with 350 mMNaCl at pH 6.0 was utilized to reduced non-specific interactions with the column matrix. The percent main peak (monomer) value was calculated using the Shimadzu software. Representative sample profiles are shown in FIGS. 7A-7C. The monomeric content of purified antibody variants is shown in Table 11.

### Example 10: Abrogation of Effector Function

[1706] In certain cases, it might be beneficial to reduce the potential effector function of the antibodies. Multiple strategies to diminish effector function have been described, including point mutations to ablate FcγR and C1q binding, cross-subclass Fc designs to eliminate FcγR and C1q binding, and glycoengineering to ablate FcγR and C1q binding. Representative examples are highlighted in Table 12.

TABLE 12
Representative Aproaches to Abrogating Effector Function

| Mutation(s) | Effect |
|---|---|
| E233P | Decreases binding to FcγRI, II, III |
| S228P, L235E SPLE in IgG4 | Decreases binding to FcγRI |
| L235E | Decreases binding to FcγRs |
| L234A, L235A | Decreases binding to FcγRI, II, III |
| L234A, L235A, G237A | Decreases binding to FcγRI, II, III, C1q |
| L234A, L235A, P329G | Decreases binding to FcγRI, II, III, C1q |
| L234F, L235E, P331S | Decreases binding to FcγRI, II, III, C1q |
| L234A, L235E, G237A | Decreases binding to FcγRI, II, III, C1q |
| L234A, L235E, G237A, P331S | Decreases binding to FcγRI, II, III, C1q |
| L234A, L235A, G237A, P238S, H268A, | Decreases binding to FcγRI, IIa, IIb, IIIa |
| A330S, P331S (IgG1σ) | |
| L234A, L235A, P329A | Decreases binding to FcγRI, II, III, C1q |
| G236R, L328R | Decreases binding to FcγRI, II, III |
| G237A | Decreases binding to FcγRII |
| F241A | Decreases binding to C1q |
| V264A | Decreases binding to C1q |
| D265A | Decreases binding to FcγRI, II, III |
| D265A, N297A | Decreases binding to FcγRI, II, III, C1q |
| D265A, N297G | Decreases binding to FcγRI, II, III, C1q |
| D270A | Decreases binding to C1q |
| N297A, G, D, Q | Elimination of N-linked glycosylation |
| | Decreases binding to FcγRI, II, III, C1q |
| P329A, G, R | Decreases binding to C1q |
| A330L | Decreases binding to C1q |
| P331A, S | Diminished C1q binding |
| IgG2 | Decreases binding to FcγRs |
| IgG4 | Decreases binding to FcγRs; |
| | Does not activate complement system |
| S228P | Prevent IgG4 Fab arm exchange |
| S228P, F234A, L235A (IgG4) | Decreases binding to FcγRI, IIa, IIIa |
| IgG2-IgG4 cross-subclass (IgG2/G4) | Decreases binding to FcγRI, II, III, C1q |
| IgG2-IgG3 cross-subclass | Decreases binding to FcγRs; |
| | Decreases binding to C1q |
| H268Q, V309L, A330S, P331S (IgG2m4) | Decreases binding to FcγRI, II, III, C1q |
| V234A, G237A, P238S, H268A, V309L, | Decreases binding to FcγRI, IIa, IIb, IIIa, C1q |
| A330S, P331S (IgG2 σ) | |
| High mannose glycosylation | Decreases binding to C1q |

[1707] In order to express antibodies with abrogated effector function, the light chain variable regions of the antibodies disclosed in Example 2 and Table 10 are cloned with a kappa light chain constant region, while the heavy chain variable regions are cloned with a modified IgG1 heavy chain backbone, or a modified IgG2 backbone, or a modified IgG4 backbone, or an unmodified IgG2 or IgG4 backbone, such as those disclosed in Table 3 or elsewhere.

[1708] The impact of the various Fc engineering approaches on CDC activity can be assessed using C1q binding and C3 fixation assays. Purified antibodies are diluted in PBS and serial dilutions are plated on a microtiter plate for 12-18 h at 4° C. The plates are blocked with 5% gelatin/PBS containing 1% (v/v) Tween-20 for 1 h at 25° C. Subsequently, the plates are incubated with 10% (v/v) human sera in PBS and C1q binding is detected using 1:500 dilution of HRP-conjugated rabbit anti-C1q (Bioss Inc.) in PBS containing 1% (v/v) Tween-20. To test C3 fixation, a 1:1000 dilution of rabbit anti C3 (abcam) is used followed by a 1:2000 dilution of HRP-conjugated chicken anti-rabbit IgG (abcam). The plates are developed as described for antibody quantitation assays in Example 1. EC50 values are calculated by fitting the data to a log (agonist) vs. response-variable slope (four parameter) model using GraphPad Prism (Sunnyvale, Calif.).

[1709] Additionally, the variants may be characterized for the binding of isolated C1q. MaxiSorp 384-well plates (Thermo Scientific, Nunc) are coated with serially diluted antibodies in 50 mM carbonate buffer, pH 9.6 (coat buffer), for 12-18 h at 4° C. Plates are washed with phosphate buffered saline (PBS) containing 0.05% polysorbate 20, pH 7.4 and blocked with PBS containing 0.5% BSA, 0.05% polysorbate 20, 15 ppm Proclin and 10% Blocker Casein (ThermoScientific), pH 7.4. After 1-hour incubation at 25° C., plates are washed. Human C1q (Quidel, San Diego, Calif.) in the same buffer is added and incubated for 1.5 hour. Bound C1q is detected by adding 20 ng/mL biotinylated mouse anti-mouse C1q (Hycult biotech; cross reacting with human C1q) for 1.5 hour followed by horseradish peroxidase (HRP)-conjugated streptavidin (GE Healthcare Life Sciences) for 1 hour. To check for coating efficiency, some coated wells receive buffer only for the first two incubation steps and receive goat anti-human Fab′2-HRP when the wells used for measuring C1q binding received streptavidin-HRP. Plates are washed after each incubation step. Peroxidase activity is detected with substrate 3,3′, 5,5′-tetramethyl benzidine (TMB) (Kirkegaard & Perry Laboratories). The reaction is stopped with 1M phosphoric acid and absorbance is measured at 450 nm. Dose-response binding curves are fitted with a four-parameter model and EC50 values are calculated using GraphPad Prism (Sunnyvale, Calif.).

[1710] The impact of the various Fc engineering approaches on ADCC activity is assessed using soluble FcγR receptor binding ELISAs. Soluble human FcγRI, FcγRIIb and FcγRIII (binding affinity to both the F158 and V158 polymorphic forms of FcγRIII is assessed) are expressed as recombinant fusion proteins with Gly-His6-glutathione-S-transferase (GST) at the C-terminus of the extracellular domain of the receptor. MaxiSorp 384-well plates are coated with 1 μg/ml human FcγR in coat buffer. Plates are washed and blocked with PBS containing 0.5% BSA, 15 ppm Proclin, pH 7.4. After a 1 h incubation, plates are washed and 3-fold serial dilution of antibodies in PBS containing 0.5% BSA, 0.05% poly sorbate 20, 15 ppm Proclin, pH 7.4 is added to the plates and incubated for 2 h. For enhanced binding sensitivity due to avidity, immune complexes are formed using anti human antibody. Bound antibody is detected with HRP-conjugated goat anti-human kappa (Southern Biotech) using Ultra TMB substrate as described in Example 1. The reaction is terminated and the plate is read as described above. The dose-dependent binding curve of the wild type antibody (no Fc modifications) is fitted with GraphPad Prism (Sunnyvale, Calif.) four parameter curve fitting program. The relative affinity of the variant vs. the wild type is estimated by dividing the equivalent ng/ml wild type concentration at the appropriate concentration.

[1711] In addition, the variants are tested directly in Fc effector bioassays (Promega) following manufacturer's directions. These assays include FcγRIIa-H ADCP Bioassay (Promega cat #G9901), ADCC Reporter Bioassays, FcγRIIIa F Variant (Promega, cat #G9798), ADCC Reporter Bioassays. FcγRIIIa V Variant (Promega, cat, #G7015). The variants are tested both as monomeric Ig and as small immune complexes (LCs) by using an anti-hu Ig antibody to form small ICs.

[1712] A Europium based ADCC assay is performed. Briefly, peripheral blood lymphocytes (PBLs) are isolated by Ficoll Paque Plus gradient centrifugation. The PBLs are collected, washed with RPMI1640, 10% FCS and resuspended in cell culture medium. The cells are diluted to 2.5×10⁶ cells/ml. Target cells are labelled with BADTA (2,2′:6′,2″-terpyridine-6,6″-dicarboxylic acid acetoxymethylester): Cells are harvested by adding Accutase (Millipore), washed once and diluted to 1×10⁶ cells/ml. Next, 2.5 uL BADTA is added per 1×10⁶ cells and incubated for 35 min at 37° C. with 5% CO₂. After labelling the cells are diluted with 10 ml culture medium, centrifuged at 200×g for 10 min and supernatant aspirated. This step is repeated 3× with culture medium/2 mM Probenicid and the sample is diluted to 1×10⁵ cells/ml, centrifuged at 300×g for 5 min, supernatant taken off and 50 uL pipetted into the wells intended for the background controls. The final ratio of effector (PBL) to target cells is 25:1.

[1713] Controls include: (1) Background: the 50 uL aliquot, diluted with 100 uL medium, (2) Spontaneous lysis: 50 uL of the labelled target cell suspension plus 100 uL culture medium, incubated 2 h at 37° C., (3) Maximal lysis: 50 uL/well of the labelled target cell suspension plus 100 uL Triton X-100 (0.5% in PBS) incubated 2 h at 37° C., (4) Lysis control without antibodies: 50 uL/well of the labelled target cell suspension and 50 uL culture medium plus 50 uL of effector cells incubated 2 h at 37° C., (5) Lysis control without effector cells: 50 uL/well of the labelled target cell suspension; add 50 uL culture medium plus antibody at highest concentration used and incubate 2 h at 37° C. At the end of the incubation period the 96 well plate is centrifuged at 100 rpm. 20 uL of each supernatant is transferred into an OptiPlate HTRF-96 (Packard) and 200 uL Europium solution is added and incubated for 15 min on a shaker. Fluorescence is measured as for time resolved fluorescence and spontaneous release and specific release are calculated.

[1714] A CDC assay is performed. Briefly, target cells are washed and diluted to 1×10⁵ cells/ml and 100 uL/well (10⁴ cells) are added to a 96-well flat bottom microtiter plate. A titration curve of the test antibody is created using serial dilutions, beginning at 1 ug/mL. Antibody is added to the plate, mixed gently, and is then placed at 37° C./5% CO2 incubator for 30 min. Next, 25 uL freshly dissolved baby rabbit complement (Cedarlane CL3441, 1 ml lyophilized, dilute freshly in 4 ml double distilled water) is added, mixed gently, and the plate is incubated at 37° C./5% CO2 incubator for 30 min. After the incubation period 50 uL supernatant is taken off and 100 uL Cell Titer Glo. reagent (Promega Corp.) is added to the remaining 100 uL supernatant. The plate is placed on an orbital shaker for 2 min, 100 uL/well is transferred into a black luminescence microtiter plate (Costar) and luminescence is measured.

[1715] Controls included: (1) medium control (target cells plus 50 uL medium), (2) maximal lysis control (target cells plus 50 uL 0.5% Triton X-100), (3) complement control (target cells plus 25 uL medium plus 25 uL complement).

### Example 11: Characterization of Potency and Species Selectivity in Whole Blood Assay

[1716] The relative potency of a panel of candidate antibodies was first assessed by determining the inhibition of interferon gamma release in human blood using the antibodies at 1 and 10 nM. All of the antibodies displayed potent activity, with A219 appearing to be one of the most potent candidates (Table 13).

TABLE 13

| Clone | % Inhibition at 1 nM Ig | % Inhibition at 10 nM Ig |
|---|---|---|
| A147 | 51.3 | 72.4 |
| A212 | 46.8 | 71.2 |
| A213 | 48.6 | 69.8 |
| A217 | 46.0 | 72.2 |
| A219 | 59.8 | 75.2 |
| A220 | 36.9 | 63.2 |

[1717] Next, three of the variants were characterized for inhibition of interferon gamma release in human blood using multiple human blood donors and testing the antibodies across a broader range of concentrations (0.01-100 nM). Representative inhibition profiles of variants A212, A213 and A219 are shown in FIG. 8. The mean IC50 values for these variants, and a control antibody termed 1D1, for the inhibition of interferon gamma release from multiple human donors is shown in Table 14.

TABLE 14

| Clone | Mean | SD |
|---|---|---|
| A212 | 51.3 | 72.4 |
| A213 | 46.8 | 71.2 |
| A219 | 48.6 | 69.8 |
| 1D1 | 46.0 | 72.2 |

### Example 12: In Vivo Assessment of Anti-Tl1a Efficacy

[1718] The efficacy of anti-TL1A antibodies in animal models of colitis is performed. Anti-TL1A antibodies are tested in rodent models of acute colitis induced by intrarectal administration of di- or tri-nitrobenzenesulfonic acid (D/TNBS) or oxazolone, and chronic colitis induced by administration of DSS in drinking water or transfer of CD45RB^{hi} T cells. DNBS and oxazolone induce localized ulceration and inflammation. DSS administration induces robust generalized inflammation of the intestinal tract characterized by erosive lesions and inflammatory infiltrate. Symptoms of all these models usually include diarrhea, occult blood, weight loss and occasionally rectal prolapse. In a prophylactic model, antibody treatment begins at the start of administration of the colitis-inducing compound. In a therapeutic model, antibody treatment begins several days after commencement of induction. The effect of the treatment on weight, stool consistency and occult blood, as well as microscopic effects on epithelial integrity and degree of inflammatory infiltrate is determined. Daily clinical scoring is performed based on stool consistency and presence of occult blood giving a disease activity index (DAI) score.

### Example 13: Phase I Clinical Trial

[1719] A phase 1 clinical trial is performed to evaluate the safety, tolerability, pharmacokinetics and pharmacodynamics of an anti-TL1A antibody from Table 20 on subjects having Crohn's disease (CD).

[1720] Single ascending dose (SAD) arms: Subjects in each group (subjects are grouped based on the presence of a genotype comprising at least one, and preferably three, polymorphism(s) selected from Table 1 and subjects without the presence of the genotype) receive either a single dose of the antibody or a placebo. Exemplary doses are 1, 3, 10, 30, 100, 300, 600 and 800 mg of antibody. Safety monitoring and PK assessments are performed for a predetermined time. Based on evaluation of the PK data, and if the antibody is deemed to be well tolerated, dose escalation occurs, either within the same groups or a further group of healthy subjects. Dose escalation continues until the maximum dose has been attained unless predefined maximum exposure is reached or intolerable side effects become apparent.

[1721] Multiple ascending dose (MAD) arms: Subjects in each group (subjects are grouped based on the same criteria as above) receive multiple doses of the antibody or a placebo. The dose levels and dosing intervals are selected as those that are predicted to be safe from the SAD data. Dose levels and dosing frequency are chosen to achieve therapeutic drug levels within the systemic circulation that are maintained at steady state for several days to allow appropriate safety parameters to be monitored. Samples are collected and analyzed to determination PK profiles.

[1722] Inclusion Criteria: Healthy subjects of non-childbearing potential between the ages of 18 and 55 years. Healthy is defined as no clinically relevant abnormalities identified by a detailed medical history, full physical examination, including blood pressure and pulse rate measurement, 12 lead ECG and clinical laboratory tests. Female subjects of non-childbearing potential must meet at least one of the following criteria: (1) achieved postmenopausal status, defined as: cessation of regular menses for at least 12 consecutive months with no alternative pathological or physiological cause; and have a serum follicle stimulating hormone (FSH) level within the laboratory's reference range for postmenopausal females; (2) have undergone a documented hysterectomy and/or bilateral oophorectomy; (3) have medically confirmed ovarian failure. All other female subjects (including females with tub al ligations and females that do NOT have a documented hysterectomy, bilateral oophorectomy and/or ovarian failure) will be considered to be of childbearing potential. Body Mass Index (BMI) of 17.5 to 30.5 kg/m2; and a total body weight>50 kg (110 lbs). Evidence of a personally signed and dated informed consent document indicating that the subject (or a legal representative) has been informed of all pertinent aspects of the study.

[1723] Two groups of CD patients are selected: patients having the genotype described herein, and patients without the genotype. For example, the genotype may comprise rs6478109, rs56124762, and rs1892231; rs6478109, rs56124762, and rs16901748; rs6478109, rs1892231, and rs16901748; rs56124762, rs1892231, and rs16901748; rs6478109, rs2070558, and rs1892231; rs6478109, rs2070558, and rs16901748; rs6478109, rs1892231, and rs16901748; rs2070558, rs1892231, and rs16901748; rs6478109, rs2070561, and rs1892231; rs6478109, rs2070561, and rs16901748; rs6478109, rs1892231, and rs16901748; rs2070561, rs1892231, and rs16901748; rs6478109, rs7935393, and rs1892231; rs6478109, rs7935393, and rs9806914; rs6478109, rs7935393, and rs7278257; rs6478109, rs7935393, and rs2070557; rs6478109, rs1892231, and rs9806914; rs6478109, rs1892231, and rs7278257; rs6478109, rs1892231, and rs2070557; rs6478109, rs9806914, and rs7278257; rs6478109, rs9806914, and rs2070557; rs6478109, rs7278257, and rs2070557; rs7935393, rs1892231, and rs9806914; rs7935393, rs1892231, and rs7278257; rs7935393, rs1892231, and rs2070557; rs7935393, rs9806914, and rs7278257; rs7935393, rs9806914, and rs2070557; rs7935393, rs7278257, and rs2070557; rs1892231, rs9806914, and rs7278257; rs1892231, rs9806914, and rs2070557; rs1892231, rs7278257, and rs2070557; or rs9806914, rs7278257, and rs2070557.

[1724] Exclusion Criteria: Evidence or history of clinically significant hematological, renal, endocrine, pulmonary, gastrointestinal, cardiovascular, hepatic, psychiatric, neurologic, or allergic disease (including drug allergies, but excluding untreated, asymptomatic, seasonal allergies at time of dosing). Subjects with a history of or current positive results for any of the following serological tests: Hepatitis B surface antigen (HBsAg), Hepatitis B core antibody (HBcAb), anti-Hepatitis C antibody (HCV Ab) or human immunodeficiency virus (HIV). Subjects with a history of allergic or anaphylactic reaction to a therapeutic drug. Treatment with an investigational drug within 30 days (or as determined by the local requirement, whichever is longer) or 5 half-lives or 180 days for biologics preceding the first dose of study medication. Pregnant females; breastfeeding females; and females of childbearing potential.

[1725] Primary Outcome Measures: Incidence of dose limiting or intolerability treatment related adverse events (AEs) [Time Frame: 12 weeks]. Incidence, severity and causal relationship of treatment emergent AEs (TEAEs) and withdrawals due to treatment emergent adverse events [Time Frame: 12 weeks]. Incidence and magnitude of abnormal laboratory findings [Time Frame: 12 weeks]. Abnormal and clinically relevant changes in vital signs, blood pressure (BP) and electrocardiogram (ECG) parameters [Time Frame: 12 weeks].

[1726] Secondary Outcome Measures: Single Ascending Dose: Maximum Observed Plasma Concentration (Cmax) [Time Frame: 12 weeks]. Single Ascending Dose: Time to Reach Maximum Observed Plasma Concentration (Tmax) [Time Frame: 12 weeks]. Single Ascending Dose: Area under the plasma concentration-time profile from time zero to 14 days (AUC14 days) [Time Frame: 12 weeks]. Single Ascending Dose: Area under the plasma concentration-time profile from time zero extrapolated to infinite time (AUCinf) [Time Frame: 12 weeks]. Single Ascending Dose: Area under the plasma concentration-time profile from time zero to the time of last quantifiable concentration (AUClast) [Time Frame: 12 weeks]. Single Ascending Dose: Dose normalized maximum plasma concentration (Cmax[dn]) [Time Frame: 12 weeks]. Single Ascending Dose: Dose normalized area under the plasma concentration-time profile from time zero extrapolated to infinite time (AUCinf[dn]) [Time Frame: 12 weeks]. Single Ascending Dose: Dose normalized area under the plasma concentration-time profile from time zero to the time of last quantifiable concentration (AUClast[dn]) [Time Frame: 12 weeks]. Single Ascending Dose: Plasma Decay Half-Life (t1/2) [Time Frame: 12 weeks]. Plasma decay half-life is the time measured for the plasma concentration to decrease by one half. Single Ascending Dose: Mean residence time (MRT) [Time Frame: 12 weeks]. Single Ascending Dose: Volume of Distribution at Steady State (Vss) [Time Frame: 6 weeks]. Volume of distribution is defined as the theoretical volume in which the total amount of drug would need to be uniformly distributed to produce the desired blood concentration of a drug. Steady state volume of distribution (Vss) is the apparent volume of distribution at steady-state. Single Ascending Dose: Systemic Clearance (CL) [Time Frame: 6]. CL is a quantitative measure of the rate at which a drug substance is removed from the body.

[1727] Multiple Ascending Dose First Dose: Maximum Observed Plasma Concentration (Cmax) [Time Frame: 12 weeks]. Multiple Ascending Dose First Dose: Time to Reach Maximum Observed Plasma Concentration (Tmax) [Time Frame: 12 weeks]. Multiple Ascending Dose First Dose: Area under the plasma concentration-time profile from time zero to time t, the dosing interval where τ=2 weeks (AUCτ) [Time Frame: 12 weeks]. Multiple Ascending Dose First Dose: Dose normalized maximum plasma concentration (Cmax[dn]) [Time Frame: 12 weeks]. Multiple Ascending Dose First Dose: Dose normalized Area under the plasma concentration-time profile from time zero to time τ, the dosing interval where τ=2 weeks (AUCτ[dn]) [Time Frame: 12 weeks]. Plasma Decay Half-Life (t1/2) [Time Frame: 12 weeks]. Plasma decay half-life is the time measured for the plasma concentration to decrease by one half. Multiple Ascending Dose First Dose: Mean residence time (MRT) [Time Frame: 12 weeks]. Apparent Volume of Distribution (Vz/F) [Time Frame: 12 weeks]. Volume of distribution is defined as the theoretical volume in which the total amount of drug would need to be uniformly distributed to produce the desired plasma concentration of a drug. Apparent volume of distribution after oral dose (Vz/F) is influenced by the fraction absorbed. Multiple Ascending Dose First Dose: Volume of Distribution at Steady State (Vss) [Time Frame: 12 weeks]. Volume of distribution is defined as the theoretical volume in which the total amount of drug would need to be uniformly distributed to produce the desired blood concentration of a drug. Steady state volume of distribution (Vss) is the apparent volume of distribution at steady-state. Multiple Ascending Dose First Dose: Apparent Oral Clearance (CL/F) [Time Frame: 12 weeks]. Clearance of a drug is a measure of the rate at which a drug is metabolized or eliminated by normal biological processes. Clearance obtained after oral dose (apparent oral clearance) is influenced by the fraction of the dose absorbed. Clearance is estimated from population pharmacokinetic (PK) modeling. Drug clearance is a quantitative measure of the rate at which a drug substance is removed from the blood. Multiple Ascending Dose First Dose: Systemic Clearance (CL) [Time Frame: 12 weeks]. CL is a quantitative measure of the rate at which a drug substance is removed from the body.

[1728] Multiple Ascending Dose Multiple Dose: Maximum Observed Plasma Concentration (Cmax) [Time Frame: 12 weeks]. Multiple Ascending Dose Multiple Dose: Time to Reach Maximum Observed Plasma Concentration (Tmax) [Time Frame: 12 weeks]. Multiple Ascending Dose Multiple Dose: Area under the plasma concentration-time profile from time zero to time τ, the dosing interval where τ=2 weeks (AUCτ) [Time Frame: 12 weeks]. Multiple Ascending Dose Multiple Dose: Dose normalized maximum plasma concentration (Cmax[dn]) [Time Frame: 12 weeks]. Multiple Ascending Dose Multiple Dose: Dose normalized Area under the plasma concentration-time profile from time zero to time τ, the dosing interval where τ=2 weeks (AUCτ[dn]) [Time Frame: 12 weeks]. Multiple Ascending Dose Multiple Dose: Plasma Decay Half-Life (t1/2) [Time Frame: 12 weeks]. Plasma decay half-life is the time measured for the plasma concentration to decrease by one half. Multiple Ascending Dose Multiple Dose: Apparent Volume of Distribution (Vz/F) [Time Frame: 12 weeks]. Volume of distribution is defined as the theoretical volume in which the total amount of drug would need to be uniformly distributed to produce the desired plasma concentration of a drug. Apparent volume of distribution after oral dose (Vz/F) is influenced by the fraction absorbed. Multiple Ascending Dose Multiple Dose: Volume of Distribution at Steady State (Vss) [Time Frame: 12 weeks]. Volume of distribution is defined as the theoretical volume in which the total amount of drug would need to be uniformly distributed to produce the desired blood concentration of a drug. Steady state volume of distribution (Vss) is the apparent volume of distribution at steady-state.

[1729] Multiple Ascending Dose Multiple Dose: Apparent Oral Clearance (CL/F) [Time Frame: 12 weeks]. Clearance of a drug is a measure of the rate at which a drug is metabolized or eliminated by normal biological processes. Clearance obtained after oral dose (apparent oral clearance) is influenced by the fraction of the dose absorbed. Clearance was estimated from population pharmacokinetic (PK) modeling. Drug clearance is a quantitative measure of the rate at which a drug substance is removed from the blood. Multiple Ascending Dose Multiple Dose: Systemic Clearance (CL) [Time Frame: 12 weeks]. CL is a quantitative measure of the rate at which a drug substance is removed from the body. Multiple Ascending Dose Multiple Dose: Minimum Observed Plasma Trough Concentration (Cmin) [Time Frame: 12 weeks]. Multiple Ascending Dose Multiple Dose: Average concentration at steady state (Cav) [Time Frame: 12 weeks]. Multiple Ascending Dose Multiple Dose: Observed accumulation ratio (Rac) [Time Frame: 12 weeks]. Multiple Ascending Dose Multiple Dose: Peak to trough fluctuation (PTF) [Time Frame: 12 weeks]. Multiple Ascending Dose Additional Parameter: estimate of bioavailability (F) for subcutaneous administration at the corresponding intravenous dose [Time Frame: 12 weeks]. Immunogenicity for both Single Ascending Dose and Multiple Ascending Dose: Development of anti-drug antibodies (ADA) [Time Frame: 12 weeks].

### Example 14: Phase 1B Clinical Trial

[1730] A phase 1b open label clinical trial is performed to evaluate efficacy of an anti-TL1A antibody on subjects having CD.

[1731] Arms: 10 patients positive for genotypes comprising at least one, but preferably three, polymorphism(s) provided in Table 1 are administered the antibody. 10 patients negative for the genotype are administered the antibody. Patients are monitored in real-time. Central ready of endoscopy and biopsy is employed, with readers blinded to point of time of treatment and endpoints.

[1732] For example, the genotypes may comprise rs6478109, rs56124762, and rs1892231; rs6478109, rs56124762, and rs16901748; rs6478109, rs1892231, and rs16901748; rs56124762, rs1892231, and rs16901748; rs6478109, rs2070558, and rs1892231; rs6478109, rs2070558, and rs16901748; rs6478109, rs1892231, and rs16901748; rs2070558, rs1892231, and rs16901748; rs6478109, rs2070561, and rs1892231; rs6478109, rs2070561, and rs16901748; rs6478109, rs1892231, and rs16901748; rs2070561, rs1892231, and rs16901748; rs6478109, rs7935393, and rs1892231; rs6478109, rs7935393, and rs9806914; rs6478109, rs7935393, and rs7278257; rs6478109, rs7935393, and rs2070557; rs6478109, rs1892231, and rs9806914; rs6478109, rs1892231, and rs7278257; rs6478109, rs1892231, and rs2070557; rs6478109, rs9806914, and rs7278257; rs6478109, rs9806914, and rs2070557; rs6478109, rs7278257, and rs2070557; rs7935393, rs1892231, and rs9806914; rs7935393, rs1892231, and rs7278257; rs7935393, rs1892231, and rs2070557; rs7935393, rs9806914, and rs7278257; rs7935393, rs9806914, and rs2070557; rs7935393, rs7278257, and rs2070557; rs1892231, rs9806914, and rs7278257; rs1892231, rs9806914, and rs2070557; rs1892231, rs7278257, and rs2070557; or rs9806914, rs7278257, and rs2070557.

[1733] Inclusion Criteria: Two groups of patients are selected: subject with the genotype described herein, and patients without the genotype.

[1734] Primary Outcome Measures: Simple Endoscopic Score for Crohn's Disease (SESCD), Crohn's Disease Activity Index (CDAI), and Patient Reported Outcome (PRO). If risk either positive group shows 50% reduction from baseline, a Phase 2a clinical trial is performed.

[1735] Inclusion Criteria: PRO entry criteria: Abdominal pain score of 2 or more and/or stool frequency score of 4 or more. Primary outcome would be pain core of 0 or 1 and stool frequency score of 3 or less with no worsening from baseline. Endoscopy entry criteria: SESCD ileum only entry at score of 4 and 6 if colon is involved. Primary endoscopic outcome is 40-50% delta of mean SESCD.

### Example 15: Phase 2A Clinical Trial

[1736] A phase 2a clinical trial is performed to evaluate the efficacy of an anti-TL1A antibody in patients with CD. Optionally, the patients are positive for a genotype comprising at least one, but preferably three, polymorphism(s) provided in Table 1.

[1737] Arms: 40 patients per arm (antibody and placebo arms) are treated with antibody or placebo for 12 weeks. An interim analysis is performed after 20 patients from each group are treated at the highest dose to look for a 40-50% delta between placebo and treated group in primary outcome (50% reduction from baseline in SESCD, CDAI, and PRO).

[1738] Primary Outcome Measures: Simple Endoscopic Score for Crohn's Disease (SESCD), Crohn's Disease Activity Index (CDAI), and Patient Reported Outcome (PRO).

[1739] Inclusion Criteria: PRO entry criteria: Abdominal pain score of 2 or more and/or stool frequency score of 4 or more. Primary outcome would be pain core of 0 or 1 and stool frequency score of 3 or less with no worsening from baseline. Endoscopy entry criteria: SESCD ileum only entry at score of 4 and 6 if colon is involved. Primary endoscopic outcome is 40-50% delta of mean SESCD.

### Example 16: Treating Crohn's Disease (CD) in a Subject

[1740] CD is treated in a subject, by first, determining the genotypes of the subject. Optionally, the subject is, or is susceptible to, non-response to the induction of certain therapies such as anti-TNF, steroids, or immunomodulators, or loses response to such therapies after a period of time. A sample of whole blood is obtained from the subject. An assay is performed on the sample obtained from the subject to detect a presence of a genotype comprising at least one, but preferably three or four, polymorphism(s) provided in Table 1.

[1741] At three polymorphisms comprising rs6478109, rs56124762, and rs1892231; rs6478109, rs56124762, and rs16901748; rs6478109, rs1892231, and rs16901748; rs56124762, rs1892231, and rs16901748; rs6478109, rs2070558, and rs1892231; rs6478109, rs2070558, and rs16901748; rs6478109, rs1892231, and rs16901748; rs2070558, rs1892231, and rs16901748; rs6478109, rs2070561, and rs1892231; rs6478109, rs2070561, and rs16901748; rs6478109, rs1892231, and rs16901748; rs2070561, rs1892231, and rs16901748; rs6478109, rs7935393, and rs1892231; rs6478109, rs7935393, and rs9806914; rs6478109, rs7935393, and rs7278257; rs6478109, rs7935393, and rs2070557; rs6478109, rs1892231, and rs9806914; rs6478109, rs1892231, and rs7278257; rs6478109, rs1892231, and rs2070557; rs6478109, rs9806914, and rs7278257; rs6478109, rs9806914, and rs2070557; rs6478109, rs7278257, and rs2070557; rs7935393, rs1892231, and rs9806914; rs7935393, rs1892231, and rs7278257; rs7935393, rs1892231, and rs2070557; rs7935393, rs9806914, and rs7278257; rs7935393, rs9806914, and rs2070557; rs7935393, rs7278257, and rs2070557; rs1892231, rs9806914, and rs7278257; rs1892231, rs9806914, and rs2070557; rs1892231, rs7278257, and rs2070557; or rs9806914, rs7278257, and rs2070557, or any of the above combinations in which a polymorphism is substituted with a proxy polymorphism, are detected in the sample by Illumina ImmunoArray or polymerase chain reaction (PCR) under standard hybridization conditions. Proxy polymorphisms are identified using linkage disequilibrium with a D′ 1 value of at least 0.8, or an revalue of at least 0.85. In some cases, the proxy polymorphism is additionally selected based on an independent association between the polymorphism and a relevant clinical phenotype of CD (e.g., stricturing and penetrating disease) In this example, one or more primer pairs described herein and/or nucleic acid probes comprising nucleic acid sequences capable of hybridizing the nucleic acid sequences, or their reverse compliments, provided in SEQ ID NOS: 2001-2041, or 2057-2059, are used.

[1742] A TNFSF15 profile is generated that correlates the presence or absence of the genotypes with a positive, negative or indeterminate result for a therapeutic response to treatment with an inhibitor of TL1A activity or expression with a positive predictive value and specificity of at least or about 70%.

[1743] The TNFSF15 profile of the subject is positive. Based on the TNFSF15 profile of the CD patient, a doctor determines that the subject is suitable for treatment with the inhibitor of TL1A activity or expression. A therapeutically effective amount of an inhibitor of TL1A activity or expression is administered to the subject with the positive TNFSF15 profile. The inhibitor of TL1A activity or expression may comprise an anti-TL1A antibody. The anti-TL1A antibody may be an antibody listed in Table 20. The anti-TL1A antibody may be a neutralizing anti-TL1A antibody.

TABLE 15
CDR Amino Acid Sequences

| SEQ | | |
|---|---|---|
| ID | | |
| NO | Description | Sequence |
| 1 | P HCDR1 | GFDIQDTYMH |
| 601 | P HCDR1 | DTYMH |
| 602 | P HCDR1 | KYDIN |
| 603 | P HCDR1 | GFEIQDTYMH |
| 604 | P HCDR1 | GFDPQDTYMH |
| 605 | P HCDR1 | GFDVQDTYMH |
| 606 | P HCDR1 | GFDIGDTYMH |
| 607 | P HCDR1 | GFDISDTYMH |
| 608 | P HCDR1 | GFDIVDTYMH |
| 609 | P HCDR1 | GFDIQDAYMH |
| 610 | P HCDR1 | GFDIQDSYMH |
| 611 | P HCDR1 | GFDIQDTFMH |
| 612 | P HCDR1 | GFDIQDTYIH |
| 613 | P HCDR1 | GFDLQDTYMH |
| 614 | P HCDR1 | GFDIQDTYLH |
| 615 | P HCDR1 | GFDIGDTFIH |
| 616 | P HCDR1 | GFDIGDTFMH |
| 617 | P HCDR1 | GFDIGDTYIH |
| 618 | P HCDR1 | GFDIQDTFIH |
| 619 | P HCDR1 | GFDIQDTFMH |
| 620 | P HCDR1 | GFDIQDTYIH |
| 621 | P HCDR1 | GFDISDTFIH |
| 622 | P HCDR1 | GFDISDTFMH |
| 623 | P HCDR1 | GFDISDTYIH |
| 624 | P HCDR1 | GFDISDTYMH |
| 625 | P HCDR1 | GFDIVDTFIH |
| 626 | P HCDR1 | GFDIVDTFMH |
| 627 | P HCDR1 | GFDIVDTYIH |
| 628 | P HCDR1 | GFDPGDTFIH |
| 629 | P HCDR1 | GFDPGDTFMH |
| 630 | P HCDR1 | GFDPGDTYIH |
| 631 | P HCDR1 | GFDPGDTYMH |
| 632 | P HCDR1 | GFDPQDTFIH |
| 633 | P HCDR1 | GFDPQDTFMH |
| 634 | P HCDR1 | GFDPQDTYIH |
| 635 | P HCDR1 | GFDPQDTYMH |
| 636 | P HCDR1 | GFDPSDTFIH |
| 637 | P HCDR1 | GFDPSDTFMH |
| 638 | P HCDR1 | GFDPSDTYIH |
| 639 | P HCDR1 | GFDPSDTYMH |
| 640 | P HCDR1 | GFDPVDTFIH |
| 641 | P HCDR1 | GFDPVDTFMH |
| 642 | P HCDR1 | GFDPVDTYIH |
| 643 | P HCDR1 | GFDPVDTYMH |
| 644 | P HCDR1 | GFDVGDTFIH |
| 645 | P HCDR1 | GFDVGDTFMH |
| 646 | P HCDR1 | GFDVGDTYIH |
| 647 | P HCDR1 | GFDVGDTYMH |
| 648 | P HCDR1 | GFDVQDTFIH |
| 649 | P HCDR1 | GFDVQDTFMH |
| 650 | P HCDR1 | GFDVQDTYIH |
| 651 | P HCDR1 | GFDVSDTFIH |
| 652 | P HCDR1 | GFDVSDTFMH |
| 653 | P HCDR1 | GFDVSDTYIH |
| 654 | P HCDR1 | GFDVSDTYMH |
| 655 | P HCDR1 | GFDVVDTFIH |
| 656 | P HCDR1 | GFDVVDTFMH |
| 657 | P HCDR1 | GFDVVDTYIH |
| 658 | P HCDR1 | GFDVVDTYMH |
| 659 | P HCDR1 | GFEIGDTFIH |
| 660 | P HCDR1 | GFEIGDTFMH |
| 661 | P HCDR1 | GFEIGDTYIH |
| 662 | P HCDR1 | GFEIGDTYMH |
| 663 | P HCDR1 | GFEIQDTFIH |
| 664 | P HCDR1 | GFEIQDTFMH |
| 665 | P HCDR1 | GFEIQDTYIH |
| 666 | P HCDR1 | GFEIQDTYMH |
| 667 | P HCDR1 | GFEISDTFIH |
| 668 | P HCDR1 | GFEISDTFMH |
| 669 | P HCDR1 | GFEISDTYIH |
| 670 | P HCDR1 | GFEISDTYMH |
| 671 | P HCDR1 | GFEIVDTFIH |
| 672 | P HCDR1 | GFEIVDTFMH |
| 673 | P HCDR1 | GFEIVDTYIH |
| 674 | P HCDR1 | GFEIVDTYMH |
| 675 | P HCDR1 | GFEPGDTFIH |
| 676 | P HCDR1 | GFEPGDTFMH |
| 677 | P HCDR1 | GFEPGDTYIH |
| 678 | P HCDR1 | GFEPGDTYMH |
| 679 | P HCDR1 | GFEPQDTFIH |
| 680 | P HCDR1 | GFEPQDTFMH |
| 681 | P HCDR1 | GFEPQDTYIH |
| 682 | P HCDR1 | GFEPQDTYMH |
| 683 | P HCDR1 | GFEPSDTFIH |
| 684 | P HCDR1 | GFEPSDTFMH |
| 685 | P HCDR1 | GFEPSDTYIH |
| 686 | P HCDR1 | GFEPSDTYMH |
| 687 | P HCDR1 | GFEPVDTFIH |
| 688 | P HCDR1 | GFEPVDTFMH |
| 689 | P HCDR1 | GFEPVDTYIH |
| 690 | P HCDR1 | GFEPVDTYMH |
| 691 | P HCDR1 | GFEVGDTFIH |
| 692 | P HCDR1 | GFEVGDTFMH |
| 693 | P HCDR1 | GFEVGDTYIH |
| 694 | P HCDR1 | GFEVGDTYMH |
| 695 | P HCDR1 | GFEVQDTFIH |
| 696 | P HCDR1 | GFEVQDTFMH |
| 697 | P HCDR1 | GFEVQDTYIH |
| 698 | P HCDR1 | GFEVQDTYMH |
| 699 | P HCDR1 | GFEVSDTFIH |
| 700 | P HCDR1 | GFEVSDTFMH |
| 701 | P HCDR1 | GFEVSDTYIH |
| 702 | P HCDR1 | GFEVSDTYMH |
| 703 | P HCDR1 | GFEVVDTFIH |
| 704 | P HCDR1 | GFEVVDTFMH |
| 705 | P HCDR1 | GFEVVDTYIH |
| 706 | P HCDR1 | GFEVVDTYMH |
| 707 | P HCDR1 | GFX₁X₂X₃DX₄X₅X₆H |
| | | X1 = D or E |
| | | X2 = I, L, P, or V |
| | | X3 = G, Q, S, or V |
| | | X4 = A, S, T |
| | | X5 = F or Y |
| | | X6 = I, L, or M |
| 708 | P HCDR1 | GFX₁X₂X₃DTX₄X₅H |
| | | X₁ = D, OR E |
| | | X₂ = I, P, OR V |
| | | X₃ = G, Q, S, OR V |
| | | X₄ = F, OR Y |
| | | X₅ = I, OR M |
| 709 | M1 HCDR1 | GFTFSSYW |
| 710 | M2 HCDR1 | GGSFTGFY |
| 711 | M3 HCDR1 | GY(X1)F(X2)(X3)YGIS; X1 = P, |
| | | S, D, Q, N; X2 = T, R; |
| | | X3 = N, T, Y, H |
| 712 | M3 HCDR1 | GYDFTYYGIS |
| 713 | M4 HCDR1 | SRSYYWG |
| 714 | M5 HCDR1 | TSNMGVV |
| 715 | M6 HCDR1 | LYGMN |
| 716 | M6 HCDR1 | NYGMN |
| 717 | M7 HCDR1 | GYTFTSSWMH |
| 718 | M8 HCDR1 | GYTFTSYDIN |
| 719 | M9 HCDR1 | SYFWS |
| 720 | M10 HCDR1 | GYYWN |
| 721 | M11 HCDR1 | GFTFSTYG |
| 722 | M12 HCDR1 | TYGMS |
| 2 | P HCDR2 | RIDPASGHTKYDPKFQV |
| 3 | P HCDR2 | RIEPASGHIKYDPKFQG |
| 4 | P HCDR2 | RIDPASGHIKYDPKFQG |
| 5 | P HCDR2 | RIEPASGHIKYDPKFQV |
| 723 | P HCDR2 | WIFPGDGRTDYNEKFKG |
| 724 | P HCDR2 | RLDPASGHTK |
| 725 | P HCDR2 | RIEPASGHTK |
| 726 | P HCDR2 | RIDPESGHTK |
| 727 | P HCDR2 | RIDPASGHTK |
| 728 | P HCDR2 | RIDPAGGHTK |
| 729 | P HCDR2 | RIDPASAHTK |
| 730 | P HCDR2 | RIDPASGHIK |
| 731 | P HCDR2 | RIDPASGHLK |
| 732 | P HCDR2 | RIDPASGHVK |
| 733 | P HCDR2 | YDPKFQV |
| 734 | P HCDR2 | IDPKFQV |
| 735 | P HCDR2 | LDPKFQV |
| 736 | P HCDR2 | MDPKFQV |
| 737 | P HCDR2 | SDPKFQV |
| 738 | P HCDR2 | TDPKFQV |
| 739 | P HCDR2 | VDPKFQV |
| 740 | P HCDR2 | YIPKFQV |
| 741 | P HCDR2 | YNPKFQV |
| 742 | P HCDR2 | YRPKFQV |
| 743 | P HCDR2 | YSPKFQV |
| 744 | P HCDR2 | YDPKFRV |
| 745 | P HCDR2 | YDPKFQA |
| 746 | P HCDR2 | YDPKFQD |
| 747 | P HCDR2 | YDPKFQE |
| 748 | P HCDR2 | YDPKFQG |
| 749 | P HCDR2 | YDPKFQH |
| 750 | P HCDR2 | YDPKFQK |
| 751 | P HCDR2 | YDPKFQL |
| 752 | P HCDR2 | YDPKFQM |
| 753 | P HCDR2 | YDPKFQN |
| 754 | P HCDR2 | YDPKFQP |
| 755 | P HCDR2 | YDPKFQR |
| 756 | P HCDR2 | YDPKFQS |
| 757 | P HCDR2 | YDPKFQT |
| 758 | P HCDR2 | RIEPASGHIKYDPKFQG |
| 759 | P HCDR2 | RIEPASGHIKYSPKFQG |
| 760 | P HCDR2 | RIEPASGHVKYSPKFQV |
| 761 | P HCDR2 | RIEPASGHVKYDPKFQT |
| 762 | P HCDR2 | RIDPASGHIKYDPKFQK |
| 763 | P HCDR2 | RIDPASGHVKIDPKFQV |
| 764 | P HCDR2 | RIDPASGHLKYDPKFQV |
| 765 | P HCDR2 | RIDPASGHLKYDPKFQR |
| 766 | P HCDR2 | RIDPASGHLKYDPKFQN |
| 767 | P HCDR2 | RIEPASGHLKYDPKFQE |
| 768 | P HCDR2 | PASGH |
| 769 | P HCDR2 | RIDPASGHTKYDPKFQV |
| 770 | P HCDR2 | RIDPASGHLKYDPKFQG |
| 771 | P HCDR2 | RIDPASGHTKYDPKFQG |
| 772 | P HCDR2 | RIDPASGHSKYDPKFQV |
| 773 | P HCDR2 | RIDPASGHYKYDPKFQV |
| 774 | P HCDR2 | RX₁X₂PX₃X₄X₅HX₆KX₇X₈PKFX₉X₁₀ |
| | | X1 = I or L |
| | | X2 = D or E |
| | | X3 = A or E |
| | | X4 = G or S |
| | | X5 = A or G |
| | | X6 = I, L, T, or V |
| | | X7 = I, L, M, S, T, V, or Y |
| | | X8 = D, I, N, R, or S |
| | | X9 = Q or R |
| | | X10 = A, D, E, G, H, K, L, M, |
| | | N, P, R, S, T, or V |
| 775 | M1 HCDR2 | IKEDGSEK |
| 776 | M2 HCDR 2 | INHRGNT |
| 777 | M3 HCDR2 | WIS(X1)YNG(X2)(X3)(X4)YA(X5) |
| | | (X6)(X7)QG; X1 = T, P, S, A; |
| | | X2 = N, G, V, K, A; X3 = T, K; |
| | | X4 = H, N; X5 = Q, R; X6 = K, |
| | | M; X7 = L, H |
| 778 | M3 HCDR2 | WISTYNGNTHYARMLQG |
| 779 | M4 HCDR2 | SIYYNGRTYYNPSLKS |
| 780 | M5 HCDR2 | HILWDDREYSNPALKS |
| 781 | M6 HCDR2 | WINTYTGEPTYADDFKG |
| 782 | M7 HCDR2 | IHPNSGGT |
| 783 | M8 HCDR2 | WLNPNSGXTG; X = N, Y |
| 784 | M9 HCDR2 | YIYYSGNTKYNPSLKS |
| 785 | M10 HCDR2 | EINHAGNTNYNPSLKS |
| 786 | M11 HCDR2 | ISGTGRTT |
| 787 | M12 HCDR2 | WMNTYSGVTTYADDFKG |
| 6 | P HCDR3 | SGGLPDV |
| 7 | P HCDR3 | ARSGGLPDV |
| 8 | P HCDR3 | SGGLPDW |
| 9 | P HCDR3 | ARSGGLPDW |
| 788 | P HCDR3 | YGPAMDY |
| 789 | P HCDR3 | LGGLPDV |
| 790 | P HCDR3 | SAGLPDV |
| 791 | P HCDR3 | SGGAPDV |
| 792 | P HCDR3 | SGGMPDV |
| 793 | P HCDR3 | SGGLPEV |
| 794 | P HCDR3 | SGGLPDK |
| 795 | P HCDR3 | SGGLPDM |
| 796 | P HCDR3 | SGGLPDQ |
| 797 | P HCDR3 | SGGLPDR |
| 798 | P HCDR3 | SGGLPDS |
| 799 | P HCDR3 | SGGLPDT |
| 800 | P HCDR3 | SGGLPDH |
| 801 | P HCDR3 | SGGLPDF |
| 802 | P HCDR3 | SGGSPDV |
| 803 | P HCDR3 | ARSGGLPDM |
| 804 | P HCDR3 | ARSGGLPDK |
| 805 | P HCDR3 | SGGLPD |
| 806 | P HCDR3 | ARSGGLPDF |
| 807 | P HCDR3 | ARSGGLPDL |
| 808 | P HCDR3 | SGGLPDE |
| 809 | P HCDR3 | SGGLPDI |
| 810 | P HCDR3 | SGGLPDK |
| 811 | P HCDR3 | SGGLPDL |
| 812 | P HCDR3 | SGGLPDM |
| 813 | P HCDR3 | SGGLPDQ |
| 814 | P HCDR3 | SGGLPDT |
| 815 | P HCDR3 | SGGLPDW |
| 816 | P HCDR3 | SGGLPDY |
| 817 | P HCDR3 | SGGMPDE |
| 818 | P HCDR3 | SGGMPDI |
| 819 | P HCDR3 | SGGMPDK |
| 820 | P HCDR3 | SGGMPDL |
| 821 | P HCDR3 | SGGMPDM |
| 822 | P HCDR3 | SGGMPDQ |
| 823 | P HCDR3 | SGGMPDT |
| 824 | P HCDR3 | SGGMPDV |
| 825 | P HCDR3 | SGGMPDW |
| 826 | P HCDR3 | SGGMPDY |
| 827 | P HCDR3 | X₁X₂GX₃PX₄X₅ |
| | | X1 = L or S |
| | | X2 = A or G |
| | | X3 = A, L, or M |
| | | X4 = D or E |
| | | X5 = K, M, Q, R, S, T, V, or W |
| 828 | P HCDR3 | SGGX₁PDX₂ |
| | | X₁ = L, OR M |
| | | X₂ = E, I, K, L, M, Q, T, V, |
| | | W, OR Y |
| 829 | M1 HCDR3 | AREDYDSYYKYGMDV |
| 830 | M2 HCDR3 | ASPFYDFWSGSDY |
| 831 | M3 HCDR3 | ENYYGSG(X1)(X2)R GGMD(X3); |
| | | X1 = S, A; X2 = Y, P; X3 = V, |
| | | A, G |
| 832 | M3 HCDR3 | ENYYGSGAYRGGMDV |
| 833 | M4 HCDR3 | EDYGDYGAFDI |
| 834 | M5 HCDR3 | MSRNYYGSSYVMDY |
| 835 | M6 HCDR3 | DTAMDYAMAY |
| 836 | M6 HCDR3 | DYGKYGDYYAMDY |
| 837 | M7 HCDR3 | ARGDYYGYVSWFAY |
| 838 | M8 HCDR3 | EVPETAAFEY |
| 839 | M9 HCDR3 | ETGSYYGFDY |
| 840 | M10 HCDR3 | GYCRSTTCYFDY |
| 841 | M11 HCDR3 | TKERGDYYYGVFDY |
| 842 | M12 HCDR3 | EGYVFDDYYATDY |
| 10 | P LCDR1 | RASSSVSYMY |
| 843 | P LCDR1 | RSSQTIVHSNGDTYLD |
| 844 | P LCDR1 | GASSSVSYMY |
| 845 | P LCDR1 | WASSSVSYMY |
| 846 | P LCDR1 | RASSSVIYMY |
| 847 | P LCDR1 | RASSSVSFMY |
| 848 | P LCDR1 | RASSSVSYLY |
| 849 | P LCDR1 | RASSSVSYMR |
| 850 | P LCDR1 | GASSSVSYMY |
| 851 | P LCDR1 | ASSSVSYMY |
| 852 | P LCDR1 | X₁ASSSVX₂X₃X₄X₅ |
| | | X1 = G, R, or W |
| | | X2 = I or S |
| | | X3 = F or Y |
| | | X4 = L or M |
| | | X5 = R or Y |
| 853 | M1 LCDR1 | QSILYSSNNKNY |
| 854 | M2 LCDR1 | QSLVHSDGNTY |
| 855 | M3 LCDR1 | RASQSVSSYLA |
| 856 | M4 LCDR1 | RASQGISSALA |
| 857 | M5 LCDR1 | SASSSVNYMH |
| 858 | M6 LCDR1 | KSSQNIVHSDGNTYLE |
| 859 | M6 LCDR1 | RSSQSIVHSNGNTYLD |
| 860 | M7 LCDR1 | QNINVL |
| 861 | M8 LCDR1 | TSSSSDIGA(X1)(X2)GV(X3); |
| | | X1 = G, A; X2 = L, S, Q; |
| | | X3 = H, L |
| 862 | M9 LCDR1 | RASQSINNYLN |
| 863 | M10 LCDR1 | RASQSVRSSYLA |
| 864 | M11 LCDR1 | QTISSW |
| 865 | M12 LCDR1 | RSSQNIVHSDGNTYLE |
| 11 | P LCDR2 | ATSNLAS |
| 866 | P LCDR2 | KVSNRFS |
| 867 | P LCDR2 | AKSNLAS |
| 868 | P LCDR2 | ATPNLAS |
| 869 | P LCDR2 | ATENLAS |
| 870 | P LCDR2 | ATSLLAS |
| 871 | P LCDR2 | ATSPLAS |
| 872 | P LCDR2 | ATSNLTS |
| 873 | P LCDR2 | AX₁X₂X₃LX₄S |
| | | X1 = K or T |
| | | X2 = E, P, or S |
| | | X3 = L, N, or P |
| | | X4 = A or T |
| 874 | M1 LCDR2 | WAS |
| 875 | M2 LCDR2 | KIS |
| 876 | M3 LCDR2 | DASNRAT |
| 877 | M4 LCDR2 | DASSLES |
| 878 | M5 LCDR2 | STSNLAS |
| 879 | M6 LCDR2 | KVSNRFS |
| 880 | M7 LCDR2 | KAS |
| 881 | M8 LCDR2 | GYYNRPS |
| 882 | M9 LCDR2 | AASSLOS |
| 883 | M10 LCDR2 | GASSRAT |
| 884 | M11 LCDR2 | AAS |
| 885 | M12 LCDR2 | KVSNRFS |
| 12 | P LCDR3 | QQWEGNPRT |
| 13 | P LCDR3 | QQWKGNPRT |
| 14 | P LCDR3 | QQWSGNPRT |
| 15 | P LCDR3 | QQWSRNPRT |
| 886 | P LCDR3 | FQGSHVPYT |
| 887 | P LCDR3 | HQWSGNPRT |
| 888 | P LCDR3 | NOWSGNPRT |
| 889 | P LCDR3 | SQWSGNPRT |
| 890 | P LCDR3 | QQSSGNPRT |
| 891 | P LCDR3 | QQWDGNPRT |
| 892 | P LCDR3 | QQWHGNPRT |
| 893 | P LCDR3 | QQWNGNPRT |
| 894 | P LCDR3 | QQWQGNPRT |
| 895 | P LCDR3 | QQWVGNPRT |
| 896 | P LCDR3 | QQWSANPRT |
| 897 | P LCDR3 | QQWSDNPRT |
| 898 | P LCDR3 | QQWSQNPRT |
| 899 | P LCDR3 | QQWSSNPRT |
| 900 | P LCDR3 | QQWSGNPRS |
| 901 | P LCDR3 | QQFSGNPRT |
| 902 | P LCDR3 | QQHSGNPRT |
| 903 | P LCDR3 | QQISGNPRT |
| 904 | P LCDR3 | QQPSGNPRT |
| 905 | P LCDR3 | QQRSGNPRT |
| 906 | P LCDR3 | QQYSGNPRT |
| 907 | P LCDR3 | QQWSGHPRT |
| 908 | P LCDR3 | QQWSGLPRT |
| 909 | P LCDR3 | QQWSGQPRT |
| 910 | P LCDR3 | QQWSGSPRT |
| 911 | P LCDR3 | QQWSGTPRT |
| 912 | P LCDR3 | QQWSGMPRT |
| 913 | P LCDR3 | QQWSGFPRT |
| 914 | P LCDR3 | QQWSGKPRT |
| 915 | P LCDR3 | QQWSGRPRT |
| 916 | P LCDR3 | QQWSGDPRT |
| 917 | P LCDR3 | QQWAGNPRT |
| 918 | P LCDR3 | QQWYGNPRT |
| 919 | P LCDR3 | QQWFGNPRT |
| 920 | P LCDR3 | QQWQGNPRT |
| 921 | P LCDR3 | GNPRT |
| 922 | P LCDR3 | SQWSGNPRT |
| 923 | P LCDR3 | QQWSGNPRS |
| 924 | P LCDR3 | QQWSGTPRT |
| 925 | P LCDR3 | QQWSGDPRT |
| 926 | P LCDR3 | QQWSGFPRT |
| 927 | P LCDR3 | QQWSGKPRT |
| 928 | P LCDR3 | QQWSGRPRT |
| 929 | P LCDR3 | QQWSGSPRT |
| 930 | P LCDR3 | QQWDADPRT |
| 931 | P LCDR3 | QQWDAFPRT |
| 932 | P LCDR3 | QQWDAKPRT |
| 933 | P LCDR3 | QQWDANPRT |
| 934 | P LCDR3 | QQWDARPRT |
| 935 | P LCDR3 | QQWDASPRT |
| 936 | P LCDR3 | QQWDATPRT |
| 937 | P LCDR3 | QQWDGDPRT |
| 938 | P LCDR3 | QQWDGFPRT |
| 939 | P LCDR3 | QQWDGKPRT |
| 940 | P LCDR3 | QQWDGNPRT |
| 941 | P LCDR3 | QQWDGRPRT |
| 942 | P LCDR3 | QQWDGSPRT |
| 943 | P LCDR3 | QQWDGTPRT |
| 944 | P LCDR3 | QQWEADPRT |
| 945 | P LCDR3 | QQWEAFPRT |
| 946 | P LCDR3 | QQWEAKPRT |
| 947 | P LCDR3 | QQWEANPRT |
| 948 | P LCDR3 | QQWEARPRT |
| 949 | P LCDR3 | QQWEASPRT |
| 950 | P LCDR3 | QQWEATPRT |
| 951 | P LCDR3 | QQWEGDPRT |
| 952 | P LCDR3 | QQWEGFPRT |
| 953 | P LCDR3 | QQWEGKPRT |
| 954 | P LCDR3 | QQWEGRPRT |
| 955 | P LCDR3 | QQWEGSPRT |
| 956 | P LCDR3 | QQWEGTPRT |
| 957 | P LCDR3 | QQWHADPRT |
| 958 | P LCDR3 | QQWHAFPRT |
| 959 | P LCDR3 | QQWHAKPRT |
| 960 | P LCDR3 | QQWHANPRT |
| 961 | P LCDR3 | QQWHARPRT |
| 962 | P LCDR3 | QQWHASPRT |
| 963 | P LCDR3 | QQWHATPRT |
| 964 | P LCDR3 | QQWHGDPRT |
| 965 | P LCDR3 | QQWHGFPRT |
| 966 | P LCDR3 | QQWHGKPRT |
| 967 | P LCDR3 | QQWHGNPRT |
| 968 | P LCDR3 | QQWHGRPRT |
| 969 | P LCDR3 | QQWHGSPRT |
| 970 | P LCDR3 | QQWHGTPRT |
| 971 | P LCDR3 | QQWNADPRT |
| 972 | P LCDR3 | QQWNAFPRT |
| 973 | P LCDR3 | QQWNAKPRT |
| 974 | P LCDR3 | QQWNANPRT |
| 975 | P LCDR3 | QQWNARPRT |
| 976 | P LCDR3 | QQWNASPRT |
| 977 | P LCDR3 | QQWNATPRT |
| 978 | P LCDR3 | QQWNGDPRT |
| 979 | P LCDR3 | QQWNGFPRT |
| 980 | P LCDR3 | QQWNGKPRT |
| 981 | P LCDR3 | QQWNGNPRT |
| 982 | P LCDR3 | QQWNGRPRT |
| 983 | P LCDR3 | QQWNGSPRT |
| 984 | P LCDR3 | QQWNGTPRT |
| 985 | P LCDR3 | QQWQADPRT |
| 986 | P LCDR3 | QQWQAFPRT |
| 987 | P LCDR3 | QQWQAKPRT |
| 988 | P LCDR3 | QQWQANPRT |
| 989 | P LCDR3 | QQWQARPRT |
| 990 | P LCDR3 | QQWQASPRT |
| 991 | P LCDR3 | QQWQATPRT |
| 992 | P LCDR3 | QQWQGDPRT |
| 993 | P LCDR3 | QQWQGFPRT |
| 994 | P LCDR3 | QQWQGKPRT |
| 995 | P LCDR3 | QQWQGRPRT |
| 996 | P LCDR3 | QQWQGSPRT |
| 997 | P LCDR3 | QQWQGTPRT |
| 998 | P LCDR3 | QQWSADPRT |
| 999 | P LCDR3 | QQWSAFPRT |
| 1000 | P LCDR3 | QQWSAKPRT |
| 1001 | P LCDR3 | QQWSANPRT |
| 1002 | P LCDR3 | QQWSARPRT |
| 1003 | P LCDR3 | QQWSASPRT |
| 1004 | P LCDR3 | QQWSATPRT |
| 1005 | P LCDR3 | NQWDAFPRT |
| 1006 | P LCDR3 | NQWDAKPRT |
| 1007 | P LCDR3 | NQWDANPRT |
| 1008 | P LCDR3 | NQWDARPRT |
| 1009 | P LCDR3 | NQWDASPRT |
| 1010 | P LCDR3 | NQWDATPRT |
| 1011 | P LCDR3 | NQWDGDPRT |
| 1012 | P LCDR3 | NQWDGFPRT |
| 1013 | P LCDR3 | NQWDGKPRT |
| 1014 | P LCDR3 | NQWDGNPRT |
| 1015 | P LCDR3 | NQWDGRPRT |
| 1016 | P LCDR3 | NQWDGSPRT |
| 1017 | P LCDR3 | NQWDGTPRT |
| 1018 | P LCDR3 | NQWEADPRT |
| 1019 | P LCDR3 | NQWEAFPRT |
| 1020 | P LCDR3 | NQWEAKPRT |
| 1021 | P LCDR3 | NQWEANPRT |
| 1022 | P LCDR3 | NQWEARPRT |
| 1023 | P LCDR3 | NQWEASPRT |
| 1024 | P LCDR3 | NQWEATPRT |
| 1025 | P LCDR3 | NQWEGDPRT |
| 1026 | P LCDR3 | NQWEGFPRT |
| 1027 | P LCDR3 | NQWEGKPRT |
| 1028 | P LCDR3 | NQWEGNPRT |
| 1029 | P LCDR3 | NQWEGRPRT |
| 1030 | P LCDR3 | NQWEGSPRT |
| 1031 | P LCDR3 | NQWEGTPRT |
| 1032 | P LCDR3 | NQWHADPRT |
| 1033 | P LCDR3 | NQWHAFPRT |
| 1034 | P LCDR3 | NQWHAKPRT |
| 1035 | P LCDR3 | NQWHANPRT |
| 1036 | P LCDR3 | NQWHARPRT |
| 1037 | P LCDR3 | NQWHASPRT |
| 1038 | P LCDR3 | NQWHATPRT |
| 1039 | P LCDR3 | NQWHGDPRT |
| 1040 | P LCDR3 | NQWHGFPRT |
| 1041 | P LCDR3 | NQWHGKPRT |
| 1042 | P LCDR3 | NQWHGNPRT |
| 1043 | P LCDR3 | NQWHGRPRT |
| 1044 | P LCDR3 | NQWHGSPRT |
| 1045 | P LCDR3 | NQWHGTPRT |
| 1046 | P LCDR3 | NQWNADPRT |
| 1047 | P LCDR3 | NQWNAFPRT |
| 1048 | P LCDR3 | NQWNAKPRT |
| 1049 | P LCDR3 | NQWNANPRT |
| 1050 | P LCDR3 | NQWNARPRT |
| 1051 | P LCDR3 | NQWNASPRT |
| 1052 | P LCDR3 | NQWNATPRT |
| 1053 | P LCDR3 | NQWNGDPRT |
| 1054 | P LCDR3 | NQWNGFPRT |
| 1055 | P LCDR3 | NQWNGKPRT |
| 1056 | P LCDR3 | NQWNGNPRT |
| 1057 | P LCDR3 | NQWNGRPRT |
| 1058 | P LCDR3 | NQWNGSPRT |
| 1059 | P LCDR3 | NQWNGTPRT |
| 1060 | P LCDR3 | NQWQADPRT |
| 1061 | P LCDR3 | NQWQAFPRT |
| 1062 | P LCDR3 | NQWQAKPRT |
| 1063 | P LCDR3 | NQWQANPRT |
| 1064 | P LCDR3 | NQWQARPRT |
| 1065 | P LCDR3 | NQWQASPRT |
| 1066 | P LCDR3 | NQWQATPRT |
| 1067 | P LCDR3 | NQWQGDPRT |
| 1068 | P LCDR3 | NQWQGFPRT |
| 1069 | P LCDR3 | NQWQGKPRT |
| 1070 | P LCDR3 | NQWQGNPRT |
| 1071 | P LCDR3 | NQWQGRPRT |
| 1072 | P LCDR3 | NQWQGSPRT |
| 1073 | P LCDR3 | NQWQGTPRT |
| 1074 | P LCDR3 | NQWSADPRT |
| 1075 | P LCDR3 | NQWSAFPRT |
| 1076 | P LCDR3 | NQWSAKPRT |
| 1077 | P LCDR3 | NQWSANPRT |
| 1078 | P LCDR3 | NQWSARPRT |
| 1079 | P LCDR3 | NQWSASPRT |
| 1080 | P LCDR3 | NQWSATPRT |
| 1081 | P LCDR3 | NQWSGDPRT |
| 1082 | P LCDR3 | NQWSGFPRT |
| 1083 | P LCDR3 | NQWSGKPRT |
| 1084 | P LCDR3 | NQWSGNPRT |
| 1085 | P LCDR3 | NQWSGRPRT |
| 1086 | P LCDR3 | NQWSGSPRT |
| 1087 | P LCDR3 | NQWSGTPRT |
| 1088 | P LCDR3 | X₁QWX₂X₃X₄PRT |
| | | X₁ = Q, OR N |
| | | X₂ = D, E, H, N, Q, OR S |
| | | X₃ = A, OR G |
| | | X₄ = D, F, K, N, R, S, OR T |
| 1089 | P LCDR3 | X₁QX₂X₃X₄X₅PRX₆ |
| | | X1 = H, N, Q, or S |
| | | X2 = F, H, I, P, R, S, W, or Y |
| | | X3 = D, E, H, N, Q, S, or V |
| | | X4 = A, D, G, Q, or S |
| | | X5 = D, F, H, K, L, M, N, Q, |
| | | R, S, or T |
| | | X6 = T or S |
| 1090 | M1 LCDR3 | QQYYSTPFT |
| 1091 | M2 LCDR3 | MQATQFPLT |
| 1092 | M3 LCDR3 | QQRSNWPWT |
| 1093 | M4 LCDR3 | QQFNSYPLT |
| 1094 | M5 LCDR3 | HQWNNYGT |
| 1095 | M6 LCDR3 | FQGSHVPLT |
| 1096 | M7 LCDR3 | QQGQSYPYT |
| 1097 | M8 LCDR3 | QSXDGTLSAL; X = Y, W, F |
| 1098 | M9 LCDR3 | QQSYSTPRT |
| 1099 | M10 LCDR3 | QQYGSSPT |
| 1100 | M11 LCDR3 | QQYHRSWT |
| 1101 | M12 LCDR3 | FQGSHVPLT |

TABLE 16
Heavy Chain Variable Region (VH) Amino Acid Sequences

| SEQ | | |
|---|---|---|
| ID | | |
| NO | Description | Sequence |
| 101 | 217 VH, 158 VH | QVQLVQSGAEVKKPGASVKVSCKASGFDIQDTYMHWVKQ |
| | | RPGQGLEWMGRIDPASGHTKYDPKFQVRVTITRDTSTSTV |
| | | YMELSSLRSEDTAVYYCARSGGLPDVWGQGTTVTVSS |
| 102 | 220 VH, 160 VH | QVQLVQSGAEVKKPGASVKVSCKASGFDIQDTYMHWVKQ |
| | | RPGQGLEWMGRIDPASGHTKYDPKFQVRVTMTRDTSTSTA |
| | | YLELSSLRSEDTAVYYCARSGGLPDVWGQGTTVTVSS |
| 103 | 223 VH, 200 VH, | EVQLVQSGAEVKKPGASVKVSCKASGFDIQDTYMHWVRQ |
| | 194 VL, 206 VH | RPGQGLEWIGRIDPASGHTKYDPKFQVRATITTDTSTSTAY |
| | | LELSSLRSEDTAVYYCARSGGLPDVWGQGTTVTVSS |
| 104 | 219 VH, 157 VH | QVQLVQSGAEVKKPGASVKVSCKASGFDIQDTYMHWVKQ |
| | | RPGQGLEWMGRIDPASGHTKYDPKFQVRVTITRDTSTSTV |
| | | YLELSSLRSEDTAVYYCARSGGLPDVWGQGTTVTVSS |
| 105 | 221 VH, 125 VH | QVQLVQSGAEVKKPGASVKVSCKASGFDIQDTYMHWVKQ |
| | | RPGQGLEWMGRIDPASGHTKYDPKFQVRATITRDTSTSTA |
| | | YLELSSLRSEDTAVYYCARSGGLPDVWGQGTTVTVSS |
| 106 | 213 VH, 162 VH | QVQLVQSGAEVKKPGASVKVSCKASGFDIQDTYMHWVRQ |
| | | RPGQGLEWMGRIDPASGHTKYDPKFQVRVTITTDTSTSTVY |
| | | MELSSLRSEDTAVYYCARSGGLPDVWGQGTTVTVSS |
| 107 | 212 VH, 100 VH, | QVQLVQSGAEVKKPGASVKVSCKASGFDIQDTYMHWVRQ |
| | 181 VH, 34 VH, 79 | RPGQGLEWIGRIDPASGHTKYDPKFQVRATITTDTSTSTAY |
| | VH | LELSSLRSEDTAVYYCARSGGLPDVWGQGTTVTVSS |
| 108 | 107 VH, 211 VH, | QVQLVQSGAEVKKPGASVKVSCKASGFDIQDTYMHWVKQ |
| | 15 VH, 30 VH, 29 | RPGQGLEWIGRIDPASGHTKYDPKFQVRATITTDTSTSTAY |
| | VH, 48 VH, 49 VH, | LELSSLRSEDTAVYYCARSGGLPDVWGQGTTVTVSS |
| | 50 VH, 51 VH, 52 | |
| | VH, 56 VH | |
| 109 | 205 VH, 199 VH, | EVQLVQSGAEVKKPGASVKVSCKASGFDIQDTYMHWVKQ |
| | 55 VH, 193 VH | RPGQGLEWIGRIDPASGHTKYDPKFQVRATITTDTSTSTAY |
| | | LELSSLRSEDTAVYYCARSGGLPDVWGQGTTVTVSS |
| 110 | 129 VH, 139 VH, | QVQLVQSGAEVKKPGASVKVSCKASGFDIQDTYMHWVRQ |
| | 140 VH, 215 VH | RPGQGLEWMGRIDPASGHTKYDPKFQVRVTITTDTSTSTAY |
| | | LELSSLRSEDTAVYYCARSGGLPDVWGQGTTVTVSS |
| 111 | 214 VH, 128 VH, | QVQLVQSGAEVKKPGASVKVSCKASGFDIQDTYMHWVRQ |
| | 141 VH, 142 VH, | RPGQGLEWMGRIDPASGHTKYDPKFQVRVTITRDTSTSTA |
| | 144 VH | YLELSSLRSEDTAVYYCARSGGLPDVWGQGTTVTVSS |
| 112 | 216 VH, 123 VH | QVQLVQSGAEVKKPGASVKVSCKASGFDIQDTYMHWVRQ |
| | | RPGQGLEWIGRIDPASGHTKYDPKFQVRVTITRDTSTSTAY |
| | | LELSSLRSEDTAVYYCARSGGLPDVWGQGTTVTVSS |
| 113 | 122 VH | QVQLVQSGAEVKKPGASVKVSCKASGFDIQDTYMHWVRQ |
| | | RPGQGLEWIGRIDPASGHTKYDPKFQVRATITRDTSTSTAY |
| | | LELSSLRSEDTAVYYCARSGGLPDVWGQGTTVTVSS |
| 114 | 222 VH, 126 VH | QVQLVQSGAEVKKPGASVKVSCKASGFDIQDTYMHWVKQ |
| | | RPGQGLEWMGRIDPASGHTKYDPKFQVRVTITRDTSTSTA |
| | | YLELSSLRSEDTAVYYCARSGGLPDVWGQGTTVTVSS |
| 115 | 188 VH, 41 VH, | QVQLVQSGAEVKKPGASVKVSCKASGFDIQDTYMHWVKQ |
| | 102 VH | RPGQGLEWIGRIDPASGHTKYDPKFQVRVTITTDTSTSTAY |
| | | LELSSLRSEDTAVYYCARSGGLPDVWGQGTTVTVSS |
| 116 | 203 VH, 197 VH, | EVQLVQSGAEVKKPGASVKVSCKASGFDIQDTYMHWVKQ |
| | 209 VH, 224 VH | APGQGLEWMGRIEPASGHIKYDPKFQGRVTMTRDTSTSTV |
| | | YMELSSLRSEDTAVYYCARSGGLPDWWGQGTTVTVSS |
| 117 | 147 VH, 112 VH, | QVQLVQSGAEVKKPGASVKVSCKASGFDIQDTYMHWVKQ |
| | 59 VH | RPGQGLEWMGRIEPASGHIKYDPKFQGRVTMTRDTSTSTV |
| | | YMELSSLRSEDTAVYYCARSGGLPDWWGQGTTVTVSS |
| 118 | 127 VH | QVQLVQSGAEVKKPGASVKVSCKASGFDIQDTYMHWVKQ |
| | | RPGQGLEWMGRIDPASGHTKYDPKFQVRVTITTDTSTSTAY |
| | | LELSSLRSEDTAVYYCARSGGLPDVWGQGTTVTVSS |
| 119 | 159 VH, 218 VH | QVQLVQSGAEVKKPGASVKVSCKASGFDIQDTYMHWVKQ |
| | | RPGQGLEWMGRIDPASGHTKYDPKFQVRVTITRDTSTSTA |
| | | YMELSSLRSEDTAVYYCARSGGLPDVWGQGTTVTVSS |
| 120 | 103 VH, 45 VH, | QVQLVQSGAEVKKPGASVKVSCKASGFDIQDTYMHWVKQ |
| | 167 VH, 187 VH | RPGQGLEWIGRIDPASGHTKYDPKFQVRVTITRDTSTSTAY |
| | | LELSSLRSEDTAVYYCARSGGLPDVWGQGTTVTVSS |
| 121 | 64 VH, 148 VH, 97 | QVQLVQSGAEVKKPGASVKVSCKASGFDIQDTYMHWVRQ |
| | VH, 114 VH, 130 | APGQGLEWMGRIEPASGHIKYDPKFQVRVTMTRDTSTSTV |
| | VH, 133 VH, 137 | YMELSSLRSEDTAVYYCARSGGLPDWWGQGTTVTVSS |
| | VH, 155 VH | |
| 122 | 67 VH, 138 VH, | QVQLVQSGAEVKKPGASVKVSCKASGFDIQDTYMHWVRQ |
| | 115 VH, 149 VH, | APGQGLEWMGRIEPASGHIKYDPKFQVRATMTRDTSTSTV |
| | 134 VH, 98 VH, | YMELSSLRSEDTAVYYCARSGGLPDWWGQGTTVTVSS |
| | 156 VH | |
| 123 | 68 VH, 99 VH, 116 | QVQLVQSGAEVKKPGASVKVSCKASGFDIQDTYMHWVRQ |
| | VH | APGQGLEWMGRIEPASGHIKYDPKFQVRVTITRDTSTSTVY |
| | | MELSSLRSEDTAVYYCARSGGLPDWWGQGTTVTVSS |
| 124 | 94 VH, 113 VH, | QVQLVQSGAEVKKPGASVKVSCKASGFDIQDTYMHWVRQ |
| | 151 VH, 78 VH | APGQGLEWMGRIEPASGHIKYDPKFQVRATITRDTSTSTVY |
| | | MELSSLRSEDTAVYYCARSGGLPDWWGQGTTVTVSS |
| 125 | 110 VH, 58 VH, | QVQLVQSGAEVKKPGASVKVSCKASGFDIQDTYMHWVKQ |
| | 136 VH, 146 VH, | APGQGLEWMGRIEPASGHIKYDPKFQGRVTMTRDTSTSTV |
| | 154 VH | YMELSSLRSEDTAVYYCARSGGLPDWWGQGTTVTVSS |
| 126 | 169 VH, 175 VH | QVQLVQSGAEVKKPGASVKVSCKASGFDIQDTYMHWVKQ |
| | | APGQGLEWMGRIDPASGHIKYDPKFQGRVTMTRDTSTSTV |
| | | YMELSSLRSEDTAVYYCARSGGLPDWWGQGTTVTVSS |
| 127 | 173 VH, 179 VH | QVQLVQSGAEVKKPGASVKVSCKASGFDIQDTYMHWVKQ |
| | | APGQGLEWMGRIEPASGHIKYDPKFQGRATMTRDTSTSTV |
| | | YMELSSLRSEDTAVYYCARSGGLPDWWGQGTTVTVSS |
| 128 | 96 VH, 132 VH, 65 | QVQLVQSGAEVKKPGASVKVSCKASGFDIQDTYMHWVRQ |
| | VH, 150 VH | APGQGLEWMGRIEPASGHIKYDPKFQGRATMTRDTSTSTV |
| | | YMELSSLRSEDTAVYYCARSGGLPDWWGQGTTVTVSS |
| 129 | 196 VH, 202 VH, | EVQLVQSGAEVKKPGASVKVSCKASGFDIQDTYMHWVRQ |
| | 208 VH | APGQGLEWMGRIEPASGHIKYDPKFQGRATMTRDTSTSTV |
| | | YMELSSLRSEDTAVYYCARSGGLPDWWGQGTTVTVSS |
| 130 | 172 VH, 178 VH | QVQLVQSGAEVKKPGASVKVSCKASGFDIQDTYMHWVRQ |
| | | APGQGLEWMGRIDPASGHIKYDPKFQGRATMTRDTSTSTV |
| | | YMELSSLRSEDTAVYYCARSGGLPDWWGQGTTVTVSS |
| 131 | 75 VH, 72 VH, 95 | QVQLVQSGAEVKKPGASVKVSCKASGFDIQDTYMHWVRQ |
| | VH, 152 VH | APGQGLEWMGRIEPASGHIKYDPKFQGRATITTDTSTSTVY |
| | | MELSSLRSEDTAVYYCARSGGLPDWWGQGTTVTVSS |
| 132 | 174 VH, 180 VH | QVQLVQSGAEVKKPGASVKVSCKASGFDIQDTYMHWVRQ |
| | | APGQGLEWMGRIEPASGHIKYDPKFQGRATMTRDTSTSTA |
| | | YMELSSLRSEDTAVYYCARSGGLPDWWGQGTTVTVSS |
| 133 | 109 VH, 91 VH, | QVQLVQSGAEVKKPGASVKVSCKASGFDIQDTYMHWVRQ |
| | 135 VH, 145 VH, | APGQGLEWMGRIEPASGHIKYDPKFQGRVTMTRDTSTSTA |
| | 153 VH | YMELSSLRSEDTAVYYCARSGGLPDWWGQGTTVTVSS |
| 134 | 198 VH, 204 VH, | EVQLVQSGAEVKKPGASVKVSCKASGFDIQDTYMHWVRQ |
| | 210 VH | APGQGLEWMGRIEPASGHIKYDPKFQGRVTMTRDTSTSTA |
| | | YMELSSLRSEDTAVYYCARSGGLPDWWGQGTTVTVSS |
| 135 | 170 VH, 176 VH | QVQLVQSGAEVKKPGASVKVSCKASGFDIQDTYMHWVRQ |
| | | APGQGLEWMGRIDPASGHIKYDPKFQGRVTMTRDTSTSTA |
| | | YMELSSLRSEDTAVYYCARSGGLPDWWGQGTTVTVSS |
| 136 | 31 VH, 85 VH, 86 | QVQLVQSGAEVKKPGASVKVSCKASGFDIQDTYMHWVRQ |
| | VH, 87 VH, 88 VH, | APGQGLEWMGRIEPASGHIKYDPKFQGRVTMTRDTSTSTV |
| | 89 VH, 90 VH, 143 | YMELSSLRSEDTAVYYCARSGGLPDWWGQGTTVTVSS |
| | VH, clone 34 VH | |
| 137 | 32 VH, 33 VH | DVQLVQSGAEVKKPGASVKVSCKASGFDIQDTYMHWVRQ |
| | | APGQGLEWMGRIEPASGHIKYDPKFQGRVTMTRDTSTSTV |
| | | YMELSSLRSEDTAVYYCARSGGLPDWWGQGTTVTVSS |
| 138 | 35 VH, 182 VH | QVQLVQSGAEVKKPGASVKVSCKASGFDIQDTYMHWVKQ |
| | | APGQGLEWIGRIDPASGHTKYDPKFQVRATITTDTSTSTAY |
| | | LELSSLRSEDTAVYYCARSGGLPDVWGQGTTVTVSS |
| 139 | 36 VH, 81 VH, 104 | QVQLVQSGAEVKKPGASVKVSCKASGFDIQDTYMHWVRQ |
| | VH, 165 VH, | APGQGLEWIGRIDPASGHTKYDPKFQVRATITTDTSTSTAY |
| | | LELSSLRSEDTAVYYCARSGGLPDVWGQGTTVTVSS |
| 140 | 37 VH, 82 VH, 101 | QVQLVQSGAEVKKPGASVKVSCKASGFDIQDTYMHWVKQ |
| | VH, 183 VH | RPGQGLEWMGRIDPASGHTKYDPKFQVRATITTDTSTSTAY |
| | | LELSSLRSEDTAVYYCARSGGLPDVWGQGTTVTVSS |
| 141 | 38 VH, 190 VH | QVQLVQSGAEVKKPGASVKVSCKASGFDIQDTYMHWVKQ |
| | | RPGQGLEWIGRIDPASGHTKYDPKFQVRATITTDTSTSTVY |
| | | LELSSLRSEDTAVYYCARSGGLPDVWGQGTTVTVSS |
| 142 | 39 VH, 191 VH | QVQLVQSGAEVKKPGASVKVSCKASGFDIQDTYMHWVKQ |
| | | RPGQGLEWIGRIDPASGHTKYDPKFQVRATITTDTSTSTAY |
| | | MELSSLRSEDTAVYYCARSGGLPDVWGQGTTVTVSS |
| 143 | 40 VH, 105 VH, | QVQLVQSGAEVKKPGASVKVSCKASGFDIQDTYMHWVKQ |
| | 192 VH | RPGQGLEWIGRIDPASGHTKYDPKFQVRATITTDTSTSTVY |
| | | MELSSLRSEDTAVYYCARSGGLPDVWGQGTTVTVSS |
| 144 | 42 VH, 83 VH, 186 | QVQLVQSGAEVKKPGASVKVSCKASGFDIQDTYMHWVKQ |
| | VH | RPGQGLEWIGRIDPASGHTKYDPKFQVRATMTTDTSTSTAY |
| | | LELSSLRSEDTAVYYCARSGGLPDVWGQGTTVTVSS |
| 145 | 43 VH, 184 VH | QVQLVQSGAEVKKPGASVKVSCKASGFDIQDTYMHWVKQ |
| | | RPGQGLEWIGRIDPASGHTKYDPKFQVRATITRDTSTSTAY |
| | | LELSSLRSEDTAVYYCARSGGLPDVWGQGTTVTVSS |
| 146 | 44 VH, 53 VH, 166 | QVQLVQSGAEVKKPGASVKVSCKASGFDIQDTYMHWVKQ |
| | VH, 189 VH | RPGQGLEWIGRIDPASGHTKYDPKFQVRVTMTTDTSTSTAY |
| | | LELSSLRSEDTAVYYCARSGGLPDVWGQGTTVTVSS |
| 147 | 46 VH, 168 VH, | QVQLVQSGAEVKKPGASVKVSCKASGFDIQDTYMHWVKQ |
| | 185 VH | RPGQGLEWIGRIDPASGHTKYDPKFQVRATMTRDTSTSTA |
| | | YLELSSLRSEDTAVYYCARSGGLPDVWGQGTTVTVSS |
| 148 | 47 VH | QVQLVQSGAEVKKPGASVKVSCKASGFDIQDTYMHWVKQ |
| | | RPGQGLEWIGRIDPASGHTKYDPKFQVRVTMTRDTSTSTA |
| | | YLELSSLRSEDTAVYYCARSGGLPDVWGQGTTVTVSS |
| 149 | 54 VH | DVQLVQSGAEVKKPGASVKVSCKASGFDIQDTYMHWVKQ |
| | | RPGQGLEWIGRIDPASGHTKYDPKFQVRATITTDTSTSTAY |
| | | LELSSLRSEDTAVYYCARSGGLPDVWGQGTTVTVSS |
| 150 | 57 VH, 111 VH | QVQLVQSGAEVKKPGASVKVSCKASGFDIQDTYMHWVRQ |
| | | RPGQGLEWMGRIEPASGHIKYDPKFQGRVTMTRDTSTSTV |
| | | YMELSSLRSEDTAVYYCARSGGLPDWWGQGTTVTVSS |
| 151 | 60 VH, 117 VH | QVQLVQSGAEVKKPGASVKVSCKASGFDIQDTYMHWVRQ |
| | | APGQGLEWMGRIDPASGHIKYDPKFQGRVTMTRDTSTSTV |
| | | YMELSSLRSEDTAVYYCARSGGLPDWWGQGTTVTVSS |
| 152 | 61 VH | QVQLVQSGAEVKKPGASVKVSCKASGFDIQDTYMHWVRQ |
| | | APGQGLEWIGRIEPASGHIKYDPKFQGRVTMTRDTSTSTVY |
| | | MELSSLRSEDTAVYYCARSGGLPDWWGQGTTVTVSS |
| 153 | 62 VH, 118 VH | QVQLVQSGAEVKKPGASVKVSCKASGFDIQDTYMHWVRQ |
| | | APGQGLEWIGRIDPASGHIKYDPKFQGRVTMTRDTSTSTVY |
| | | MELSSLRSEDTAVYYCARSGGLPDWWGQGTTVTVSS |
| 154 | 63 VH, 120 VH | QVQLVQSGAEVKKPGASVKVSCKASGFDIQDTYMHWVRQ |
| | | APGQGLEWMGRIEPASGHVKYDPKFQGRVTMTRDTSTSTV |
| | | YMELSSLRSEDTAVYYCARSGGLPDWWGQGTTVTVSS |
| 155 | 66 VH | QVQLVQSGAEVKKPGASVKVSCKASGFDIQDTYMHWVRQ |
| | | APGQGLEWMGRIEPASGHIKYDPKFQGRVTITRDTSTSTVY |
| | | MELSSLRSEDTAVYYCARSGGLPDWWGQGTTVTVSS |
| 156 | 69 VH, 108 VH | EVQLVQSGAEVKKPGASVKVSCKASGFDIQDTYMHWVRQ |
| | | APGQGLEWMGRIEPASGHIKYDPKFQGRVTMTRDTSTSTV |
| | | YMELSSLRSEDTAVYYCARSGGLPDWWGQGTTVTVSS |
| 157 | 70 VH, 73 VH | QVQLVQSGAEVKKPGASVKVSCKASGFDIQDTYMHWVRQ |
| | | APGQGLEWMGRIEPASGHIKYDPKFQGRVTMTTDTSTSTV |
| | | YMELSSLRSEDTAVYYCARSGGLPDWWGQGTTVTVSS |
| 158 | 71 VH, 74 VH | QVQLVQSGAEVKKPGASVKVSCKASGFDIQDTYMHWVRQ |
| | | APGQGLEWMGRIEPASGHIKYDPKFQGRVTITTDTSTSTVY |
| | | MELSSLRSEDTAVYYCARSGGLPDWWGQGTTVTVSS |
| 159 | 76 VH, 119 VH | QVQLVQSGAEVKKPGASVKVSCKASGFDIQDTYMHWVRQ |
| | | APGQGLEWMGRIEPASGHTKYDPKFQGRVTMTRDTSTSTV |
| | | YMELSSLRSEDTAVYYCARSGGLPDWWGQGTTVTVSS |
| 160 | 77 VH | QVQLVQSGAEVKKPGASVKVSCKASGFDIQDTYMHWVRQ |
| | | APGQGLEWMGRIEPASGHIKYDPKFQGRATITRDTSTSTVY |
| | | MELSSLRSEDTAVYYCARSGGLPDWWGQGTTVTVSS |
| 161 | 92 VH | QVQLVQSGAEVKKPGASVKVSCKASGFDIQDTYMHWVRQ |
| | | APGQGLEWMGRIEPASGHIKYDPKFQGRVTMTRDTSTSTV |
| | | YLELSSLRSEDTAVYYCARSGGLPDWWGQGTTVTVSS |
| 162 | 93 VH | QVQLVQSGAEVKKPGASVKVSCKASGFDIQDTYMHWVRQ |
| | | APGQGLEWMGRIEPASGHIKYDPKFQGRVTMTRDTSTSTA |
| | | YLELSSLRSEDTAVYYCARSGGLPDWWGQGTTVTVSS |
| 163 | 121 VH | QVQLVQSGAEVKKPGASVKVSCKASGFDIQDTYMHWVRQ |
| | | RPGQGLEWMGRIDPASGHTKYDPKFQVRATITTDTSTSTAY |
| | | LELSSLRSEDTAVYYCARSGGLPDVWGQGTTVTVSS |
| 164 | 124 VH | QVQLVQSGAEVKKPGASVKVSCKASGFDIQDTYMHWVRQ |
| | | RPGQGLEWIGRIDPASGHTKYDPKFQVRVTITTDTSTSTAY |
| | | LELSSLRSEDTAVYYCARSGGLPDVWGQGTTVTVSS |
| 165 | 161 VH | QVQLVQSGAEVKKPGASVKVSCKASGFDIQDTYMHWVRQ |
| | | RPGQGLEWMGRIDPASGHTKYDPKFQVRVTITTDTSTSTVY |
| | | LELSSLRSEDTAVYYCARSGGLPDVWGQGTTVTVSS |
| 166 | 163 VH | QVQLVQSGAEVKKPGASVKVSCKASGFDIQDTYMHWVRQ |
| | | RPGQGLEWMGRIDPASGHTKYDPKFQVRVTITTDTSTSTAY |
| | | MELSSLRSEDTAVYYCARSGGLPDVWGQGTTVTVSS |
| 167 | 164 VH | QVQLVQSGAEVKKPGASVKVSCKASGFDIQDTYMHWVRQ |
| | | RPGQGLEWMGRIDPASGHTKYDPKFQVRVTMTTDTSTSTA |
| | | YLELSSLRSEDTAVYYCARSGGLPDVWGQGTTVTVSS |
| 168 | 171 VH, 177 VH | QVQLVQSGAEVKKPGASVKVSCKASGFDIQDTYMHWVRQ |
| | | APGQGLEWMGRIDPASGHIKYDPKFQGRATITTDTSTSTVY |
| | | MELSSLRSEDTAVYYCARSGGLPDWWGQGTTVTVSS |
| 169 | 195 VH, 201 VH, | EVQLVQSGAEVKKPGASVKVSCKASGFDIQDTYMHWVRQ |
| | 207 VH | APGQGLEWMGRIEPASGHIKYDPKFQGRATITTDTSTSTVY |
| | | MELSSLRSEDTAVYYCARSGGLPDWWGQGTTVTVSS |
| 1200 | 5C3D11 VH | EVQLQQSGAELVKPGASVKLSCTASGFDIQDTYMHWVKQ |
| | | RPEQGLEWIGRIDPASGHTKYDPKFQVKATITTDTSSNTAY |
| | | LQLSSLTSEDTAVYYCSRSGGLPDVWGAGTTVTVSS |
| 1201 | 9E12E5 VH | QVHLQQSGPELVKPGASVKLSCKASGYTFTKYDINWVRQR |
| | | PEQGLEWIGWIFPGDGRTDYNEKFKGKATLTTDKSSSTAY |
| | | MEVSRLTSEDSAVYFCARYGPAMDYWGQGTSVTVAS |
| 1202 | AS12824 VH | QVQLVQSGAEVKKPGASVKVSCKASGFDICDTYMHWVKQ |
| | | RPGQGLEWIGRIDPASGHTKYDPKFQVRATITTDTSTSTAY |
| | | LELSSLRSEDTAVYYCARSGGLPDVWGQGTTVTVSS |
| 1203 | AS12823 VH | QVQLVQSGAEVKKPGASVKLSCKASGFDICDTYMHWVRQ |
| | | RPGQGLEWIGRIDPASGHTKYDPKFQVRATMTTDTSTSTVY |
| | | LELSSLRSEDTAVYYCARSGGLPDVWGQGTTVTVSS |
| 1204 | AS12819 VH | QVQLVQSGAEVVKPGASVKLSCKASGFDICDTYMHWVRQ |
| | | RPGQGLEWMGRIDPASGHTKYDPKFQVRVTMTTDTSTSTV |
| | | YLELSSLRSEDTAVYYCARSGGLPDVWGQGTTVTVSS |
| 1205 | AS12816 VH | QVQLVQSGAEVKKPGASVKVSCKASGFDICDTYMHWVKQ |
| | | RPGQGLEWIGRIDPASGHTKYDPKFQVRATITRDTSTSTAY |
| | | LELSSLRSEDTAVYYCSRSGGLPDVWGQGTTVTVSS |
| 1206 | AS12825 VH | QVQLVQSGAEVKKPGASVKVSCKASGFDICDTYMHWVKQ |
| | | APGQGLEWMGRIDPASGHTKYDPKFQVRATMTTDTSTSTA |
| | | YLELSSLRSEDTAVYYCSRSGGLPDVWGQGTTVTVSS |
| 1207 | 12835 VH | QVQLVQSGAEVKKPGASVKLSCKASGFDIQDTYMHWVRQ |
| | | APGQGLEWMGRIDPASGHTKYDPKFQVRVTMTTDTSTSTV |
| | | YMELSSLRSEDTAVYYCSRSGGLPDVWGQGTTVTVSS |
| 1208 | 18-7 VH | QVQLVQSGAEVKKPGASVKLSCKASGFDIQDTYMHWVRQ |
| | | APGQGLEWMGRIDPASGHTKYDPKFQVRVTMTRDTSTSTV |
| | | YMELSSLRSEDTAVYYCSRSGGLPDVWGQGTTVTVSS |
| 1209 | 21-3 VH, L8 VH | QVQLVQSGAEVKKPGASVKVSCKASGFDIQDTYMHWVRQ |
| | | APGQGLEWMGRIDPASGHTKYDPKFQVRVTMTRDTSTSTV |
| | | YMELSSLRSEDTAVYYCARSGGLPDVWGQGTTVTVSS |
| 1210 | 21-3 V102K VH | QVQLVQSGAEVKKPGASVKVSCKASGFDIQDTYMHWVRQ |
| | | APGQGLEWMGRIDPASGHTKYDPKFQVRVTMTRDTSTSTV |
| | | YMELSSLRSEDTAVYYCARSGGLPDKWGQGTTVTVSS |
| 1211 | 21-3 V102M VH | QVQLVQSGAEVKKPGASVKVSCKASGFDIQDTYMHWVRQ |
| | | APGQGLEWMGRIDPASGHTKYDPKFQVRVTMTRDTSTSTV |
| | | YMELSSLRSEDTAVYYCARSGGLPDMWGQGTTVTVSS |
| 1212 | 21-3 V102Q VH | QVQLVQSGAEVKKPGASVKVSCKASGFDIQDTYMHWVRQ |
| | | APGQGLEWMGRIDPASGHTKYDPKFQVRVTMTRDTSTSTV |
| | | YMELSSLRSEDTAVYYCARSGGLPDQWGQGTTVTVSS |
| 1213 | 21-3 V102W VH | QVQLVQSGAEVKKPGASVKVSCKASGFDIQDTYMHWVRQ |
| | | APGQGLEWMGRIDPASGHTKYDPKFQVRVTMTRDTSTSTV |
| | | YMELSSLRSEDTAVYYCARSGGLPDWWGQGTTVTVSS |
| 1214 | 21-3 CDRv VH | QVQLVQSGAEVKKPGASVKVSCKASGFX₁X₂X₃DTX₄X₅HW |
| | | VRQAPGQGLEWMGRIDPASGHTKYDPKFQVRVTMTRDTS |
| | | TSTVYMELSSLRSEDTAVYYCARSGGX₆PDX₇WGQGTTVT |
| | | VSS |
| | | X₁ = D or E |
| | | X₂ = I, P, or V |
| | | X₃ = G, Q, S, or V |
| | | X₄ = F or Y |
| | | X₅ = I or M |
| | | X₆ = L or M |
| | | X₇ = E, I, K, L, M, Q, T, V, W, or Y |
| 1215 | 21-3 CDRv VH | QVQLVQSGAEVKKPGASVKVSCKASGFX₁X₂X₃DTX₄X₅HW |
| | | VRQAPGQGLEWMGRIDPASGHTKYDPKFQVRVTMTRDTS |
| | | TSTVYMELSSLRSEDTAVYYCSRSGGX₆PDX₇WGQGTTVTV |
| | | SS |
| | | X₁ = D or E |
| | | X₂ = I, P, or V |
| | | X₃ = G, Q, S, or V |
| | | X₄ = F or Y |
| | | X₅ = I or M |
| | | X₆ = L or M |
| | | X₇ = E, I, K, L, M, Q, T, V, W, or Y |
| 1216 | Clone 2 VH, clone | QVQLVQSGAEVKKPGASVKVSCKASGFDIQDTYMHWVRQ |
| | 52 VH | APGQGLEWMGRIEPASGHIKYSPKFQGRVTMTRDTSTSTV |
| | | YMELSSLRSEDTAVYYCARSGGLPDWWGQGTTVTVSS |
| 1217 | Clone 46 VH | QVQLVQSGAEVKKPGASVKVSCKASGFDIQDTYMHWVRQ |
| | | APGQGLEWMGRIEPASGHVKYSPKFQVRVTMTRDTSTSTV |
| | | YMELSSLRSEDTAVYYCARSGGLPDWWGQGTTVTVSS |
| 1218 | Clone 47 VH | QVQLVQSGAEVKKPGASVKVSCKASGFDIQDTYMHWVRQ |
| | | APGQGLEWMGRIEPASGHVKYDPKFQTRVTMTRDTSTSTV |
| | | YMELSSLRSEDTAVYYCARSGGLPDWWGQGTTVTVSS |
| 1219 | Clone 14 VH | QVQLVQSGAEVKKPGASVKVSCKASGFDIQDTYMHWVRQ |
| | | APGQGLEWMGRIDPASGHiKYDPKFQKRVTMTRDTSTSTV |
| | | YMELSSLRSEDTAVYYCARSGGLPDMWGQGTTVTVSS |
| 1220 | Clone 16L VH | QVQLVQSGAEVKKPGASVKVSCKASGFDIQDTYMHWVRQ |
| | | APGQGLEWMGRIDPASGHvKiDPKFQVRVTMTRDTSTSTV |
| | | YMELSSLRSEDTAVYYCARSGGLPDMWGQGTTVTVSS |
| 1221 | Clone 17L VH | QVQLVQSGAEVKKPGASVKVSCKASGFDIQDTYMHWVRQ |
| | | APGQGLEWMGRIDPASGHLKYDPKFQVRVTMTRDTSTSTV |
| | | YMELSSLRSEDTAVYYCARSGGLPDMWGQGTTVTVSS |
| 1222 | Clone 17L-1 VH | QVQLVQSGAEVKKPGASVKVSCKASGFDIQDTYMHWVRQ |
| | | APGQGLEWMGRIDPASGHLKYDPKFQRRVTMTRDTSTSTV |
| | | YMELSSLRSEDTAVYYCARSGGLPDMWGQGTTVTVSS |
| 1223 | Clone 23 VH, clone | QVQLVQSGAEVKKPGASVKVSCKASGFDIQDTYMHWVRQ |
| | A1 VH | APGQGLEWMGRIDPASGHLKYDPKFQNRVTMTRDTSTSTV |
| | | YMELSSLRSEDTAVYYCARSGGLPDKWGQGTTVTVSS |
| 1224 | Clone 53 VH, clone | QVQLVQSGAEVKKPGASVKVSCKASGFDIQDTYMHWVRQ |
| | E1 VH | APGQGLEWMGRIEPASGHLKYDPKFQERVTMTRDTSTSTV |
| | | YMELSSLRSEDTAVYYCARSGGLPDKWGQGTTVTVSS |
| 1225 | Clone 3-17L V-A | QVQLVQSGAEVKKPGASVKVSCKASGFDIQDTYMHWVRQ |
| | VH | APGQGLEWMGRIDPASGHLKYDPKFQGRVTITRDTSASTA |
| | | YMELSSLRSEDTAVYYCARSGGLPDMWGQGTTVTVSS |
| 1226 | Clone 3-17L VH | QVQLVQSGAEVKKPGASVKVSCKASGFDIQDTYMHWVRQ |
| | | APGQGLEWMGRIDPASGHLKYDPKFQGRVTITRDTSASTV |
| | | YMELSSLRSEDTAVYYCARSGGLPDMWGQGTTVTVSS |
| 1227 | Clone L8mod VH | QVQLVQSGAEVKKPGASVKVSCKASGFDIQDTYMHWVRQ |
| | | APGQGLEWMGRIDPASGHTKYDPKFQGRATITTDTSASTA |
| | | YLQLSSLRSEDTAVYYCARSGGLPDVWGQGTTVTVSS |
| 1228 | Clone X-V VH | QVQLVQSGAEVKKPGASVKVSCKASGFDIQDTYMHWVRQ |
| | | APGQGLEWMGRIDPASGHTKYDPKFQVRATITTDTSASTA |
| | | YLQLSSLRSEDTAVYYCARSGGLPDFWGQGTTVTVSS |
| 1229 | Clone X VH, clone | QVQLVQSGAEVKKPGASVKVSCKASGFDIQDTYMHWVRQ |
| | XL3-6 VH, clone | APGQGLEWMGRIDPASGHTKYDPKFQGRATITTDTSASTA |
| | XL3-10 VH, clone | YLQLSSLRSEDTAVYYCARSGGLPDFWGQGTTVTVSS |
| | XL3-15 VH, clone | |
| | L3-13 VH | |
| 1230 | Clone H3-1 VH | QVQLVQSGAEVKKPGASVKVSCKASGFDIQDTYMHWVRQ |
| | | APGQGLEWMGRIDPASGHTKYDPKFQGRATITTDTSASTA |
| | | YLQLSSLRSEDTAVYYCARSGGLPDLWGQGTTVTVSS |
| 1231 | Clone H2-2 VH | QVQLVQSGAEVKKPGASVKVSCKASGFDIQDTYMHWVRQ |
| | | APGQGLEWMGRIDPASGHSKYDPKFQVRATITTDTSASTA |
| | | YLQLSSLRSEDTAVYYCARSGGLPDFWGQGTTVTVSS |
| 1232 | Clone H2-5 VH | QVQLVQSGAEVKKPGASVKVSCKASGFDIQDTYMHWVRQ |
| | | APGQGLEWMGRIDPASGHYKYDPKFQVRATITTDTSASTA |
| | | YLQLSSLRSEDTAVYYCARSGGLPDFWGQGTTVTVSS |
| 1233 | M1 VH | EVOLVESGGGLVQPGGSLRLSCAVSGFTFSSYWMSWVRQA |
| | | PGKGLEWVANIKEDGSEKNYVDSVKGRFTLSSDNAKNSLY |
| | | LQMNSLRAEDTAVYYCAREDYDSYYKYGMDVWGQGTAV |
| | | IVSS |
| 1234 | M2 VH | QVQLQQWGAGLLKPSETLSLTCAVYGGSFTGFYWSWIRQP |
| | | PGKGLEWIGEINHRGNTNYNPSLKSRVTMSVDTSKNQFSLN |
| | | MISVTAADTAMYFCASPFYDFWSGSDYWGQGTLVTVSS |
| 1235 | M3 VH | QVQLVQSGAEVKKPGASVKVSCKASGYDFTYYGISWVRQ |
| | | APGQGLEWMGWISTYNGNTHYARMLQGRVTMTTDTSTRT |
| | | AYMELRSLRSDDTAVYYCARENYYGSGAYRGGMDVWGQ |
| | | GTTVTVSS |
| 1236 | M3 VH + constant | QVQLVQSGAEVKKPGASVKVSCKASGYDFTYYGISWVRQ |
| | | APGQGLEWMGWISTYNGNTHYARMLQGRVTMTTDTSTRT |
| | | AYMELRSLRSDDTAVYYCARENYYGSGAYRGGMDVWGQ |
| | | GTTVTVSSASTKGPSVFPLAPSSKSTSGGTAALGCLVKDYF |
| | | PEPVTVSWNSGALTSGVHTFPAVLQSSGLYSLSSVVTVPSSS |
| | | LGTQTYICNVNHKPSNTKVDKKVEPKSCDKTHTCPPCPAPE |
| | | AAGAPSVFLFPPKPKDTLMISRTPEVTCVVVDVSHEDPEVK |
| | | FNWYVDGVEVHNAKTKPREEQYNSTYRVVSVLTVLHQD |
| | | WLNGKEYKCKVSNKALPAPIEKTISKAKGQPREPQVYTLPP |
| | | SREEMTKNQVSLTCLVKGFYPSDIAVEWESNGQPENNYKT |
| | | TPPVLDSDGSFFLYSKLTVDKSRWQQGNVFSCSVMHEALH |
| | | NHYTQKSLSLSPG |
| 1237 | M4 VH | QLQLQESGPGLVKPSETLSLTCTVSGGSISSRSYYWGWIRQP |
| | | PGKGLEWIGSIYYNGRTYYNPSLKSRVTISVDTSKNQFSLKL |
| | | SSVTAADTAVYYCAREDYGDYGAFDIWGQGTMVTVSS |
| 1238 | M5 VH | QVTLKESGPALVKPTQTLTLTCTFSGFSLSTSNMGVVWIRQ |
| | | PPGKALEWLAHILWDDREYSNPALKSRLTISKDTSKNQVVL |
| | | TMTNMDPVDTATYYCARMSRNYYGSSYVMDYWGQGTLV |
| | | TVSS |
| 1239 | M6 VH | QVQLVQSGSELKKPGASVKVSCKASGYTFTLYGMNWVRQ |
| | | APGQGLEWMGWINTYTGEPTYADDFKGRFVFSLDTSVSTA |
| | | YLQISSLKAEDTAVYYCAR |
| | | DTAMDYAMAYWGQGTLVTVSS |
| 1240 | M6 VH | QVQLVQSGSELKKPGASVKVSCKASGYTFTLYGMNWVKQ |
| | | APGKGLKWMGWINTYTGEPTYADDFKGRFVFSLDTSVSTA |
| | | YLQISSLKAEDTA VYFCAR |
| | | DTAMDYAMAYWGQGTLVTVSS |
| 1241 | M6 VH | QVQLVQSGSELKKPGASVKVSCKASGYTFTNYGMNWVRQ |
| | | APGQGLEWMGWINTYTGEPTYADDFKGRFVFSLDTSVSTA |
| | | YLQISSLKAEDTAVYYCAR |
| | | DYGKYGDYYAMDYWGQGTLVTVSS |
| 1242 | M6 VH | QVQLVQSGSELKKPGASVKVSCKASGYTFTNYGMNWVRQ |
| | | APGKGLKWMGWINTYTGEPTYADDFKGRFVFSLDTSVSTA |
| | | YLQISSLKAEDTAVYFCAR |
| | | DYGKYGDYYAMDYWGQGTLVTVSS |
| 1243 | M7 VH | QVQLQQPGSVLVRPGASVKVSCKASGYTFTSSWMHWAKQ |
| | | RPGQGLEWIGEIHPNSGGTNYNEKFKGKATVDTSSSTAYV |
| | | DLSSLTSEDSAVYYCARGDYYGYVSWFAYWGQGTLVTVS |
| | | S |
| 1244 | M7 VH | QVQLVQSGAEVKKPGASVKVSCKASGYTFTSSWMHWARQ |
| | | APGQGLEWIGEIHPNSGGTNYAQKFQGRATLTVDTSSSTAY |
| | | MELSRLRSDDTAVYYCARGDYYGYVSWFAYWGQGTLVT |
| | | VSS |
| 1245 | M7 VH | QVQLVQSGAEVKKPGASVKVSCKASGYTFTSSWMHWARQ |
| | | APGQGLEWIGEIHPNSGGTNYAQKFQGRATMTVDTSISTAY |
| | | MELSRLRSDDTAVYYCARGDYYGYVSWFAYWGQGTLVT |
| | | VSS |
| 1246 | M7 VH | QVQLVQSGAEVKKPGASVKVSCKASGYTFTSSWMHWARQ |
| | | APGQGLEWIGEIHPNSGGTNYAQKFQGRVTMTVDTSISTAY |
| | | MELSRLRSDDTAVYYCARGDYYGYVSWFAYWGQGTLVT |
| | | VSS |
| 1247 | M7 VH | QVQLVQSGAEVKKPGASVKVSCKASGYTFTSSWMHWARQ |
| | | APGQGLEWMGEIHPNSGGTNYAQKFQGRVTMTVDTSISTA |
| | | YMELSRLRSDDTAVYYCARGDYYGYVSWFAYWGQGTLV |
| | | TVSS |
| 1248 | M8 VH | QVQLVQSGAEVKKPGASVKVSCKASGYTFTSYDINWVRQ |
| | | APGQGLEWMGWLNPNSGNTGYAQKFQGRVTMTADRSTS |
| | | TAYMELSSLRSEDTAVYYCAREVPETAAFEYWGQGTLVTV |
| | | SS |
| 1249 | M8 VH 00 | QVQLVQSGAEVKKPGASVKVSCKASGYTFTSYDINWVRQ |
| | | APGQGLEWMGWLNPNSGNTGYAQKFQGRVTMTADRSTS |
| | | TAYMELSSLRSEDTAVYYCAREVPETAAFEYWGQGTLVTV |
| | | SS |
| 1250 5 | M8 VH | QVQLVQSGAEVKKPGASVKVSCKASGYTFTSYDINWVRQ |
| | | APGQGLEWMGWLNPNSGYTGYAQKFQGRVTMTADRSTS |
| | | TAYMELSSLRSEDTAVYYCAREVPETAAFEYWGQGTLVTV |
| | | SS |
| 1251 | M8 VH 00 | QVQLVQSGAEVKKPGASVKVSCKASGYTFTSYDINWVRQ |
| | | APGQGLEWMGWLNPNSGNTGYAQKFQGRVTMTADRSTS |
| | | TAYMELSSLRSEDTAVYYCAREVPETAAFEYWGQGTLVTV |
| | | SS |
| 1252 | M8 VH | QVQLVQSGAEVKKPGASVKVSCKASGYTFTSYDINWVRQ |
| | | APGQGLEWMGWLNPNSGNTGYAQKFQGRVTMTADRSTS |
| | | TAYMELSSLRSEDTAVYYCAREVPETAAFEYWGQGTLVTV |
| | | SS |
| 1253 | M8 VH | QVQLVQSGAEVKKPGASVKVSCKASGYTFTSYDINWVRQ |
| | | APGQGLEWMGWLNPNSGNTGYAQKFQGRVTMTADRSTS |
| | | TAYMELSSLRSEDTAVYYCAREVPETAAFEYWGQGTLVTV |
| | | SS |
| 1254 | M8 VH | QVQLVQSGAEVKKPGASVKVSCKASGYTFTSYDINWVRQ |
| | | APGQGLEWMGWLNPNSGNTGYAQKFQGRVTMTADRSTS |
| | | TAYMELSSLRSEDTAVYYCAREVPETAAFEYWGQGTLVTV |
| | | SS |
| 1255 | M8 VH | QVQLVQSGAEVKKPGASVKVSCKASGYTFTSYDINWVRQ |
| | | APGQGLEWMGWLNPNSGYTGYAQKFQGRVTMTADRSTS |
| | | TAYMELSSLRSEDTAVYYCAREVPETAAFEYWGQGTLVTV |
| | | SS |
| 1256 | M8 VH 00 | QVQLVQSGAEVKKPGASVKVSCKASGYTFTSYDINWVRQ |
| | | APGQGLEWMGWLNPNSGYTGYAQKFQGRVTMTADRSTS |
| | | TAYMELSSLRSEDTAVYYCAREVPETAAFEYWGQGTLVTV |
| | | SS |
| 1257 | M8 VH | QVQLVQSGAEVKKPGASVKVSCKASGYTFTSYDINWVRQ |
| | | APGQGLEWMGWLNPNSGYTGYAQKFQGRVTMTADRSTS |
| | | TAYMELSSLRSEDTAVYYCAREVPETAAFEYWGQGTLVTV |
| | | SS |
| 1258 | M8 VH | QVQLVQSGAEVKKPGASVKVSCKASGYTFTSYDINWVRQ |
| | | APGQGLEWMGWLNPNSGYTGYAQKFQGRVTMTADRSTS |
| | | TAYMELSSLRSEDTAVYYCAREVPETAAFEYWGQGTLVTV |
| | | SS |
| 1259 | M8 VH | QVQLVQSGAEVKKPGASVKVSCKASGYTFTSYDINWVRQ |
| | | APGQGLEWMGWLNPNSGYTGYAQKFQGRVTMTADRSTS |
| | | TAYMELSSLRSEDTAVYYCAREVPETAAFEYWGQGTLVTV |
| | | SS |
| 1260 | M9 VH | QVQLQESGPGLVKPSETLSLTCTVSGGSISSYFWSWIRQPPG |
| | | KGLEWIGYIYYSGNTKYNPSLKSRVTISIDTSKNQFSLKLSS |
| | | VTAADTAVYYCARETGSYYGFDYWGQGTLVTVSS |
| 1261 | M10 VH | QVQLQQWGAGLLKPSETLSLTCAVHGGSFSGYYWNWIRQ |
| | | PPGKGLEWIGEINHAGNTNYNPSLKSRVTISLDTSKNQFSLT |
| | | LTSVTAADTAVYYCARGYCRSTTCYFDYWGQGTLVTVSS |
| 1262 | M11 VH | EVQLLESGGGLVQPGKSLRLSCAVSGFTFSTYGMNWVRQA |
| | | PGKGLEWVSSISGTGRTTYHADSVQGRFTVSRDNSKNILYL |
| | | QMNSLRADDTAVYFCTKERGDYYYGVFDYWGQGTLVTV |
| | | SS |
| 1263 | M12 VH | QIQLVQSGPELKKPGETVKISCKASGYTFTTYGMSWVKQA |
| | | PGKGLKWMGWMNTYSGVTTYADDFKGRFAFSLETSASTA |
| | | YMQIDNLKNEDTATYFCAREGYVFDDYYATDYWGQGTSV |
| | | TVSS |
| 301 | Variable Heavy 1 | X1VQLVQSGAEVKKPGASVKVSCKAS[HCDR1]WVX2QX3P |
| | | GQGLEWX4G[HCDR2]RX5TX6TX7DTSTSTX8YX9ELSSLRS |
| | | EDTAVYYCAR[HCDR3]WGQGTTVTVSS |
| | | wherein each of X1-X11 is independently selected from |
| | | A, R, N, D, C, Q, E, G, H, I, L, K, M, F, P, S, T, W, |
| | | Y, or V |
| | | In some cases, X1 = Q or E |
| | | In some cases, X2 = R or K |
| | | In some cases, X3 = A or R |
| | | In some cases, X4 = M or I |
| | | In some cases, X5 = V or A |
| | | In some cases, X6 = M or I |
| | | In some cases, X7 = R or T |
| | | In some cases, X8 = V or A |
| | | In some cases, X9 = M or L |
| 302 | Variable Heavy 2 | X1VQLVQSGAEVKKPGASVKVSCKAS[HCDR1]WVX2QX3P |
| | | GQGLEWX4G[HCDR2]RX5TX6TX7DTSTSTX8YX9ELSSLRS |
| | | EDTAVYYC[HCDR3]WGQGTTVTVSS |
| | | wherein each of X1-X11 is independently selected from |
| | | A, R, N, D, C, Q, E, G, H, I, L, K, M, F, P, S, T, W, |
| | | Y, or V |
| | | In some cases, X1 = Q or E |
| | | In some cases, X2 = R or K |
| | | In some cases, X3 = A or R |
| | | In some cases, X4 = M or I |
| | | In some cases, X5 = V or A |
| | | In some cases, X6 = M or I |
| | | In some cases, X7 = R or T |
| | | In some cases, X8 = V or A |
| | | In some cases, X9 = M or L |
| 1301 | Variable Heavy 3 | X1VQLVQSGAEVKKPGASVKVSCKAS[HCDR1]WVX2QRP |
| | | GQGLEWX4G[HCDR2]RX5TX6TX7DTSTSTX8YX9ELSSLRS |
| | | EDTAVYYCAR[HCDR3]WGQGTTVTVSS |
| | | wherein each of X1, X2, X4, X5, X6, X7, X8, X9, X10, |
| | | and X11 is independently selected from A, R, N, D, C, |
| | | Q, E, G, H, I, L, K, M, F, P, S, T, W, Y, or V |
| | | In some cases, X1 = Q or E |
| | | In some cases, X2 = R or K |
| | | In some cases, X4 = M or I |
| | | In some cases, X5 = V or A |
| | | In some cases, X6 = M or I |
| | | In some cases, X7 = R or T |
| | | In some cases, X8 = V or A |
| | | In some cases, X9 = M or L |
| 1302 | Variable Heavy 4 | X1VQLVQSGAEVKKPGASVKVSCKAS[HCDR1]WVX2QRP |
| | | GQGLEWX4G[HCDR2]RX5TX6TX7DTSTSTX8YX9ELSSLRS |
| | | EDTAVYYC[HCDR3]WGQGTTVTVSS |
| | | wherein each of X1, X2, X4, X5, X6, X7, X8, X9, X10, |
| | | and X11 is independently selected from A, R, N, D, C, |
| | | Q, E, G, H, I, L, K, M, F, P, S, T, W, Y, or V |
| | | In some cases, X1 = Q or E |
| | | In some cases, X2 = R or K |
| | | In some cases, X4 = M or I |
| | | In some cases, X5 = V or A |
| | | In some cases, X6 = M or I |
| | | In some cases, X7 = R or T |
| | | In some cases, X8 = V or A |
| | | In some cases, X9 = M or L |

TABLE 17
Light Chain Variable Region (VL) Amino Acid Sequences

| SEQ | | |
|---|---|---|
| ID | | |
| NO | Description | Sequence |
| 201 | 217 VL, | EIVLTQSPGTLSLSPGERATLSCRASSSVSYMYWYQQ |
| | 219 VL, 221 VL, | KPGQAPRPLIYATSNLASGIPDRFSGSGSGTDFTLTIS |
| | 200 VL, 213 VL, | RLEPEDFAVYYCQQWEGNPRTFGGGTKLEIK |
| | 212 VL, 211 VL, | |
| | 199 VL, 214 VL, | |
| | 216 VL, 222 VL, | |
| | 203 VL, 147 VL, | |
| | 218 VL, 179 VL, | |
| | 148 VL, 149 VL, | |
| | 151 VL, 180 VL, | |
| | 175 VL, 178 VL, | |
| | 145 VL, 146 VL, | |
| | 150 VL, 152 VL, | |
| | 176 VL, 177 VL, | |
| | 201 VL, 202 VL, | |
| | 204 VL, 215 VL, | |
| | 224 VL | |
| 202 | 223 VL, 107 VL, | EIVLTQSPGTLSLSPGERATLSCRASSSVSYMYWYQQ |
| | 205 VL, 181 VL, | |
| | 188 VL, 64 VL, | |
| | 67 VL, 68 VL, | |
| | 94 VL, 33 VL, 57 | |
| | VL, 58 VL, 59 VL, | |
| | 60 VL, 61 VL, 62 | |
| | VL, 63 VL, 65 VL, | |
| | 66 VL, 69 VL, 70 | |
| | VL, 71 VL, 72 VL, | |
| | 76 VL, 77 VL, 78 | |
| | VL, 91 VL, 92 VL, | |
| | 93 VL, 97 VL, 98 | |
| | VL, 99 VL, 140 | |
| | VL, 142 VL, 143 | |
| | VL, 182 VL, 183 | |
| | VL, 184 VL, 185 | |
| | VL, 186 VL, 187 | KPGQAPRLLIYATSNLASGIPDRFSGSGSGTDFTLTIS |
| | VL, 189 VL, 190 | RLEPEDFAVYYCQQWEGNPRTFGGGTKLEIK |
| | VL, 191 VL, 192 | |
| | VL, 206 VL, 207 | |
| | VL, 208 VL, 209 | |
| | VL, 210 VL, 18-7 | |
| | S93E VL, clone 34 | |
| | VL, clone 2 VL, | |
| | clone 46 VL, clone | |
| | 47 VL, clone 23 | |
| | VL, clone 53 | |
| 203 | 15 VL, 18-7, L8, | EIVLTQSPGTLSLSPGERATLSCRASSSVSYMYWYQQ |
| | clone L8mod VL, | KPGQAPRLLIYATSNLASGIPDRFSGSGSGTDFTLTIS |
| | clone X-V VL, | RLEPEDFAVYYCQQWSGNPRTFGGGTKLEIK |
| | clone X VL, clone | |
| | H3-1 VL, clone | |
| | H2-2 VL, clone | |
| | H2-5 VL | |
| 204 | 30 VL, 100 VL, | EIVLTQSPGTLSLSPGERATLSCRASSSVSYMYWYQQ |
| | 129 VL, 122 VL, | KPGQAPRLLIYATSNLASGIPDRFSGSGSGTDFTLTIS |
| | 127 VL, 126 VL, | RLEPEDFAVYYCQQWKGNPRTFGGGTKLEIK |
| | 160 VL, 157 VL, | |
| | 159 VL, 158 VL, | |
| | 125 VL, 103 VL, | |
| | 101 VL, 102 VL, | |
| | 104 VL, 105 VL, | |
| | 121 VL, 123 VL, | |
| | 124 VL, 128 VL, | |
| | 144 VL, 161 VL, | |
| | 162 VL, 163 VL, | |
| | 164 VL, clone L3- | |
| | 13 VL | |
| 205 | 110 VL, 197 VL, | EIVLTQSPGTLSLSPGERATLSCRASSSVSYMYWYQQKPGQ |
| | 112 VL, 169 VL, | APRPWIYATSNLASGIPDRFSGSGSGTDFTLTISRLEPEDFAV |
| | 173 VL, 115 VL, | YYCQQWEGNPRTFGGGTKLEIK |
| | 113 VL, 96 VL, | |
| | 196 VL, 172 VL, | |
| | 75 VL, 174 VL, | |
| | 109 VL, 198 VL, | |
| | 170 VL, 29 VL, 31 | |
| | VL, 32 VL, 73 VL, | |
| | 74 VL, 95 VL, 108 | |
| | VL, 111 VL, 114 | |
| | VL, 116 VL, 117 | |
| | VL, 118 VL, 119 | |
| | VL, 120 VL, 130 | |
| | VL, 153 VL, 154 | |
| | VL, 155 VL, 156 | |
| | VL, 165 VL, 166 | |
| | VL, 167 VL, 168 | |
| | VL, 171 VL, 193 | |
| | VL, 194 VL, 195 | |
| | VL, 220 VL | |
| 206 | 134 VL, 132 VL, | EIVLTQSPGTLSLSPGERATLSCRASSSVSYMYWYQQKPGQ |
| | 133 VL, 135 VL, | APRPLIYATSNLASGIPDRFSGSGSGTDFTLTISRLEPEDFAV |
| | 136 VL | YYCQQWKGNPRTFGGGTKLEIK |
| 207 | 138 VL, 137 VL, | EIVLTQSPGTLSLSPGERATLSCRASSSVSYMYWYQQKPGQ |
| | 139 VL, 141 VL, | APRLLIYATSNLASGIPDRFSGSGSGTDFTLTISRLEPEDFAV |
| | clone XL3-15 VL | YYCQQWSRNPRTFGGGTKLEIK |
| 208 | 34 VL, 35 VL, 36 | EIVLTQSPGTLSASPGERATMSCRASSSVSYMYWYQQKPG |
| | VL, 37 VL, 38 VL, | QAPRPWIYATSNLASGVPDRFSGSGSGTDYTLTISRVEPEDF |
| | 39 VL, 40 VL, 41 | AVYYCQQWSGNPRTFGGGTKLEIK |
| | VL, 42 VL, 43 VL, | |
| | 44 VL, 45 VL, 46 | |
| | VL, 47 VL, 53 VL, | |
| | 54 VL, 55 VL, 79 | |
| | VL, 81 VL, 82 VL, | |
| | 83 VL, AS12824 | |
| | VL | |
| 209 | 85 VL | EIVLTQSPGTLSLSPGERATLSCRASSSVSYMYWYQQKPGQ |
| | | APRLLIYATSNLASGVPDRFSGSGSGTDFTLTISRLEPEDFAV |
| | | YYCQQWEGNPRTFGGGTKLEIK |
| 210 | 48 VL | EIVLTQSPGTLSASPGERATLSCRASSSVSYMYWYQQKPGQ |
| | | APRPWIYATSNLASGVPDRFSGSGSGTDYTLTISRVEPEDFA |
| | | VYYCQQWSGNPRTFGGGTKLEIK |
| 211 | 49 VL | EIVLTQSPGTLSASPGERATMSCRASSSVSYMYWYQQKPG |
| | | QAPRLLIYATSNLASGVPDRFSGSGSGTDYTLTISRVEPEDF |
| | | AVYYCQQWSGNPRTFGGGTKLEIK |
| 212 | 50 VL | EIVLTQSPGTLSASPGERATMSCRASSSVSYMYWYQQKPG |
| | | QAPRPWIYATSNLASGVPDRFSGSGSGTDFTLTISRVEPEDF |
| | | AVYYCQQWSGNPRTFGGGTKLEIK |
| 213 | 51 VL | EIVLTQSPGTLSASPGERATMSCRASSSVSYMYWYQQKPG |
| | | QAPRPWIYATSNLASGVPDRFSGSGSGTDYTLTISRLEPEDF |
| | | AVYYCQQWSGNPRTFGGGTKLEIK |
| 214 | 52 VL | EIVLTQSPGTLSASPGERATMSCRASSSVSYMYWYQQKPG |
| | | QAPRPWIYATSNLASGVPDRFSGSGSGTDFTLTISRLEPEDF |
| | | AVYYCQQWSGNPRTFGGGTKLEIK |
| 215 | 56 VL | EIVLTQSPGTLSASPGERATMSCRASSSVSYMYWYQQKPG |
| | | QAPRPWIYATSNLASGIPDRFSGSGSGTDYTLTISRVEPEDF |
| | | AVYYCQQWSGNPRTFGGGTKLEIK |
| 216 | 86 VL | EIVLTQSPGTLSLSPGERATLSCRASSSVSYMYWYQQKPGQ |
| | | APRLLIYATSNLASGIPDRFSGSGSGTDYTLTISRLEPEDFAV |
| | | YYCQQWEGNPRTFGGGTKLEIK |
| 217 | 87 VL | EIVLTQSPGTLSLSPGERATLSCRASSSVSYMYWYQQKPGQ |
| | | APRLLIYATSNLASGIPDRFSGSGSGTDFTLTISRVEPEDFAV |
| | | YYCQQWEGNPRTFGGGTKLEIK |
| 218 | 88 VL | EIVLTQSPGTLSLSPGERATLSCRASSSVSYMYWYQQKPGQ |
| | | APRLLIYATSNLASGIPDRFSGSGSGTDYTLTISRVEPEDFAV |
| | | YYCQQWEGNPRTFGGGTKLEIK |
| 219 | 89 VL | EIVLTQSPGTLSASPGERATLSCRASSSVSYMYWYQQKPGQ |
| | | APRLLIYATSNLASGIPDRFSGSGSGTDFTLTISRLEPEDFAV |
| | | YYCQQWEGNPRTFGGGTKLEIK |
| 220 | 90 VL | EIVLTQSPGTMSLSPGERATLSCRASSSVSYMYWYQQKPGQ |
| | | APRLLIYATSNLASGIPDRFSGSGSGTDFTLTISRLEPEDFAV |
| | | YYCQQWEGNPRTFGGGTKLEIK |
| 1264 | 5C3D11 VL | QIVLSQSPAILSASPGEKVTMTCRASSSVSYMYWYQQKPGS |
| | | SPKPWIYATSNLASGVPDRFSGSGSGTSYSLTISRVEAEDAA |
| | | TYYCQQWSGNPRTFGGGTKLEIK |
| 1265 | 9E12E5 VL | MKLPVRLLVLMFWIPASSSDVLMTQTPLSLPVSLGDQASIS |
| | | CRSSQTIVHSNGDTYLDWFLQKPGQSPKLLIYKVSNRFSGV |
| | | PDRFSGSGSGTDFTLKISRVEAEDLGVYYCFQGSHVPYTFG |
| | | GGTKLEIK |
| 1266 | AS12823 VL | EIVLTQSPGTLSLSPGERATMSCRASSSVSYMYWYQQKPGQ |
| | | APRPWIYATSNLASGIPDRFSGSGSGTDFTLTISRVEPEDFAV |
| | | YYCQQWSGNPRTFGGGTKLEIK |
| 1267 | AS12819 VL | EIVLTQSPGTLSLSPGERVTMSCRASSSVSYMYWYQQKPGQ |
| | | APRPWIYATSNLASGVPDRFSGSGSGTDFTLTISRVEPEDFA |
| | | VYYCQQWSGNPRTFGGGTKVEIK |
| 1268 | AS12816 VL | EIVLTQSPGTLSASPGERVTLSCRASSSVSYMYWYQQKPGQ |
| | | APRPWIYATSNLASGVPDRFSGSGSGTDFTLTISRLEPEDFA |
| | | VYYCQQWSGNPRTFGGGTKLEIK |
| 1269 | AS12825 VL | EIVLTQSPGTLSASPGERVTMSCRASSSVSYMYWYQQKPG |
| | | QAPRLLIYATSNLASGVPDRFSGSGSGTDFTLTISRVEPEDF |
| | | AVYYCQQWSGNPRTFGGGTKLEIK |
| 1270 | 12835 VL | EIVLTQSPGTLSLSPGERVTMSCRASSSVSYMYWYQQKPGQ |
| | | APRPWIYATSNLASGVPDRFSGSGSGTDYTLTISRLEPEDFA |
| | | VYYCQQWSGNPRTFGGGTKLEIK |
| 1271 | 21-3 VL | EIVLTQSPGTLSLSPGERATLSCRASSSVSYMYWYQQKPGQ |
| | | APRLLIYATSNLASGVPDRFSGSGSGTDYTLTISRLEPEDFA |
| | | VYYCQQWSGNPRTFGGGTKLEIK |
| 1272 | 18-7 S92D VL | EIVLTQSPGTLSLSPGERATLSCRASSSVSYMYWYQQKPGQ |
| | | APRLLIYATSNLASGIPDRFSGSGSGTDFTLTISRLEPEDFAV |
| | | YYCQQWDGNPRTFGGGTKLEIK |
| 1273 | 18-7 S92H VL | EIVLTQSPGTLSLSPGERATLSCRASSSVSYMYWYQQKPGQ |
| | | APRLLIYATSNLASGIPDRFSGSGSGTDFTLTISRLEPEDFAV |
| | | YYCQQWHGNPRTFGGGTKLEIK |
| 1274 | 18-7 S92N VL | EIVLTQSPGTLSLSPGERATLSCRASSSVSYMYWYQQKPGQ |
| | | APRLLIYATSNLASGIPDRFSGSGSGTDFTLTISRLEPEDFAV |
| | | YYCQQWNGNPRTFGGGTKLEIK |
| 1275 | 18-7 S92Q VL, | EIVLTQSPGTLSLSPGERATLSCRASSSVSYMYWYQQKPGQ |
| | clone 14 VL, clone | APRLLIYATSNLASGIPDRFSGSGSGTDFTLTISRLEPEDFAV |
| | 16L VL, clone 17L | YYCQQWQGNPRTFGGGTKLEIK |
| | VL, clone 17L-1 | |
| | VL, clone 3-17L V- | |
| | A VL, clone 3-17L | |
| | VL | |
| 1276 | 18-7 CDRv VL | EIVLTQSPGTLSLSPGERATLSCRASSSVSYMYWYQQKPGQ |
| | | APRLLIYATSNLASGIPDRFSGSGSGTDFTLTISRLEPEDFAV |
| | | YYCX₁QWX₂X₃X₄PRTFGGGTKLEIK |
| | | X₁ = Q or N |
| | | X₂ = D, E, H, N, Q, or S |
| | | X₃ = A or G |
| | | X₄ = D, F, K, N, R, S, or T |
| 1277 | Clone 52 VL, clone | EIVLTQSPGTLSLSPGERATLSCGASSSVSYMYWYQQKPGQ |
| | A1 VL, clone E1 | APRLLIYATSNLASGIPDRFSGSGSGTDFTLTISRLEPEDFAV |
| | VL | YYCQQWEGNPRTFGGGTKLEIK |
| 1278 | Clone XL3-6 VL | EIVLTQSPGTLSLSPGERATLSCRASSSVSYMYWYQQKPGQ |
| | | APRLLIYATSNLASGIPDRFSGSGSGTDFTLTISRLEPEDFAV |
| | | YYCSQWSGNPRTFGGGTKLEIK |
| 1279 | Clone XL3-10 VL | EIVLTQSPGTLSLSPGERATLSCRASSSVSYMYWYQQKPGQ |
| | | APRLLIYATSNLASGIPDRFSGSGSGTDFTLTISRLEPEDFAV |
| | | YYCQQWSGNPRSFGGGTKLEIK |
| 1280 | M1 VL | DIVMTQSPDSLAVSLGERATINCKSSQSILYSSNNKNYLAW |
| | | YQQKPGQPPKLLIYWASTRESGVPDRFSGSGSGTDFTLTISS |
| | | LQAEDVSVYYCQQYYSTPFTFGPGTKVDIK |
| 1281 | M2 VL | DIMLTQTPLTSPVTLGQPASISCKSSQSLVHSDGNTYLSWLQ |
| | | QRPGQPPRLLFYKISNRFSGVPDRFSGSGAGTDFTLKISRVE |
| | | AEDVGVYYCMQATQFPLTFGGGTKVEIK |
| 1282 | M3 VL | EIVLTQSPATLSLSPGERATLSCRASQSVSSYLAWYQQKPG |
| | | QAPRLLIYDASNRATGIPARFSGSGSGTDFTLTISSLEPEDFA |
| | | VYYCQQRSNWPWTFGQGTKVEIK |
| 1283 | M3 VL | EIVLTQSPATLSLSPGERATLSCRASQSVSSYLAWYQQKPG |
| | | QAPRLLIYDASNRATGIPARFSGSGSGTDFTLTISSLEPEDFA |
| | | VYYCQQRSNWPWTFGQGTKVEIKRTVAAPSVFIFPPSDEQL |
| | | KSGTASVVCLLNNFYPREAKVQWKVDNALQSGNSQESVT |
| | | EQDSKDSTYSLSSTLTLSKADYEKHKVYACEVTHQGLSSPV |
| | | TKSFNRGEC |
| 1284 | M4 VL | AIQLTQSPSSLSASVGDRVTITCRASQGISSALAWYQQKPGK |
| | | APKLLIYDASSLESGVPSRFSGSGSGTDFTLTISSLQPEDFAT |
| | | YYCQQFNSYPLTFGGGTKVEIK |
| 1285 | M5 VL | DIQLTQSPSFLSASVGDRVTITCSASSSVNYMHWYQQKPGK |
| | | APKLLIYSTSNLASGVPSRFSGSGSGTEFTLTISSLQPEDFAT |
| | | YYCHQWNNYGTFGQGTKVEIKR |
| 1286 | M6 VL | DVVMTQSPLSLPVTLGQPASISCKSSQNIVHSDGNTYLEWF |
| | | QQRPGQSPRRLIYKVSNRFSGVPDRFSGSGSGTDFTLKISRV |
| | | EAEDVGVYYCFQGSHVPLTFGGGTKVEIKR |
| 1287 | M6 VL | DVVMTQSPLSLPVTLGQPASISCKSSQNIVHSDGNTYLEWF |
| | | QQRPGQSPRRLIYKVSNRFSGVPDRFSGSGSGTDFTLKISRV |
| | | EAEDVGVYYCFQGSHVPLTFGQGTKVEIKR |
| 1288 | M6 VL | DVVMTQTPLSLPVTPGEPASISCKSSQNIVHSDGNTYLEWY |
| | | LQKPGQSPQLLIYKVSNRFSGVPDRFSGSGSGTDFTLKISRV |
| | | EAEDLGVYYCFQGSHVPLTFGGGTKVEIKR |
| 1289 | M6 VL | DVVMTQTPLSLPVSLGDQASISCKSSQNIVHSDGNTYLEWY |
| | | LQKPGQSPKVLIYKVSNRFSGVPDRFSGSGSGTDFTLKISRV |
| | | EAEDLGVYYCFQGSHVPLTFGGGTKVEIKR |
| 1290 | M6 VL | DVVMTQSPLSLPVTLGQPASISCRSSQSIVHSNGNTYLDWF |
| | | QQRPGQSPRRLIYKVSNRFSGVPDRFSGSGSGTDFTLKISRV |
| | | EAEDVGVYYCFQGSHVPLTFGGGTKVEIKR |
| 1291 | M6 VL | DVVMTQSPLSLPVTLGQPASISCRSSQSIVHSNGNTYLDWF |
| | | QQRPGQSPRRLIYKVSNRFSGVPDRFSGSGSGTDFTLKISRV |
| | | EAEDVGVYYCFQGSHVPLTFGQGTKVEIKR |
| 1292 | M6 VL | DVVMTQTPLSLPVTPGEPASISCRSSQSIVHSNGNTYLDWY |
| | | LQKPGQSPQLLIYKVSNRFSGVPDRFSGSGSGTDFTLKISRV |
| | | EAEDLGVYYCFQGSHVPLTFGGGTKVEIKR |
| 1293 | M6 VL | DVVMTQTPLSLPVSLGDQASISCRSSQSIVHSNGNTYLDWY |
| | | LQKPGQSPKVLIYKVSNRFSGVPDRFSGSGSGTDFTLKINRV |
| | | EAEDLGVYFCFQGSHVPLTFGGGTKLEIKR |
| 1294 | M7 VL | DIQMNQSPSSLSASLGDTITITCHASQNINVLLSWYQQKPGN |
| | | IPKLLIYKASNLHTGVPSRFSGSGSGTGFTFTISSLQPEDIATY |
| | | YCQQGQSYPYTFGGGTKLEIK |
| 1295 | M7 VL | DIQMTQSPSSLSASVGDRVTITCQASQDISNYLNWYQQKPG |
| | | KAPKLLIYDASNLETGVPSRFSGSGSGTDFTFTISSLQPEDIA |
| | | TYYCQQYDNLPYTFGQGTKLEIK |
| 1296 | M7 VL | DIQMTQSPSSLSASVGDRVTITCQASQNINVLLNWYQQKPG |
| | | KAPKLLIYKASNLHTGVPSRFSGSGSGTDFTFTISSLQPEDIA |
| | | TYYCQQGQSYPYTFGQGTKLEIK |
| 1297 | M7 VL | DIQMNQSPSSLSASVGDRVTITCQASQNINVLLSWYQQKPG |
| | | KAPKLLIYKASNLHTGVPSRFSGSGSGTDFTFTISSLQPEDIA |
| | | TYYCQQGQSYPYTFGQGTKLEIK |
| 1298 | M8 VL | QSVLTQPPSVSGAPGQRVTISCTSSSSDIGAXXGVXWYQQL |
| | | PGTAPKLLIEGYYNRPSGVPDRFSGSKSGTSASLTITGLLPE |
| | | DEGDYYCQSXDGTLSALFGGGTKLTVLG |
| 1299 | M8 VL | QSVLTQPPSVSGAPGQRVTISCTSSSSDIGAGLGVHWYQQL |
| | | PGTAPKLLIEGYYNRPSGVPDRFSGSKSGTSASLTITGLLPE |
| | | DEGDYYCQSWDGTLSALFGGGTKLTVLG |
| 1300 | M8 VL | QSVLTQPPSVSGAPGQRVTISCTSSSSDIGAGLGVHWYQQL |
| | | PGTAPKLLIEGYYNRPSGVPDRFSGSKSGTSASLTITGLLPE |
| | | DEGDYYCQSYDGTLSALFGGGTKLTVLG |
| 1304 | M8 VL | QSVLTQPPSVSGAPGQRVTISCTSSSSDIGAALGVHWYQQL |
| | | PGTAPKLLIEGYYNRPSGVPDRFSGSKSGTSASLTITGLLPE |
| | | DEGDYYCQSWDGTLSALFGGGTKLTVLG |
| 1305 | M8 VL | QSVLTQPPSVSGAPGQRVTISCTSSSSDIGAGSGVHWYQQL |
| | | PGTAPKLLIEGYYNRPSGVPDRFSGSKSGTSASLTITGLLPE |
| | | DEGDYYCQSWDGTLSALFGGGTKLTVLG |
| 1306 | M8 VL | QSVLTQPPSVSGAPGQRVTISCTSSSSDIGAGQGVHWYQQL |
| | | PGTAPKLLIEGYYNRPSGVPDRFSGSKSGTSASLTITGLLPE |
| | | DEGDYYCQSWDGTLSALFGGGTKLTVLG |
| 1307 | M8 VL | QSVLTQPPSVSGAPGQRVTISCTSSSSDIGAGLGVLWYQQLP |
| | | GTAPKLLIEGYYNRPSGVPDRFSGSKSGTSASLTITGLLPED |
| | | EGDYYCQSWDGTLSALFGGGTKLTVLG |
| 1308 | M8 VL | QSVLTQPPSVSGAPGQRVTISCTSSSSDIGAGLGVHWYQQL |
| | | PGTAPKLLIEGYYNRPSGVPDRFSGSKSGTSASLTITGLLPE |
| | | DEGDYYCQSWDGTLSALFGGGTKLTVLG |
| 1309 | M8 VL | QSVLTQPPSVSGAPGQRVTISCTSSSSDIGAGSGVHWYQQL |
| | | PGTAPKLLIEGYYNRPSGVPDRFSGSKSGTSASLTITGLLPE |
| | | DEGDYYCQSWDGTLSALFGGGTKLTVLG |
| 1310 | M8 VL | QSVLTQPPSVSGAPGQRVTISCTSSSSDIGAGQGVHWYQQL |
| | | PGTAPKLLIEGYYNRPSGVPDRFSGSKSGTSASLTITGLLPE |
| | | DEGDYYCQSWDGTLSALFGGGTKLTVLG |
| 1311 | M8 VL | QSVLTQPPSVSGAPGQRVTISCTSSSSDIGAGLGVLWYQQLP |
| | | GTAPKLLIEGYYNRPSGVPDRFSGSKSGTSASLTITGLLPED |
| | | EGDYYCQSWDGTLSALFGGGTKLTVLG |
| 1312 | M8 VL | QSVLTQPPSVSGAPGQRVTISCTSSSSDIGAGLGVHWYQQL |
| | | PGTAPKLLIEGYYNRPSGVPDRFSGSKSGTSASLTITGLLPE |
| | | DEGDYYCQSFDGTLSALFGGGTKLTVLG |
| 1313 | M9 VL | DIQMTQSPSSLSASVGDRVTITCRASQSINNYLNWYQQRPG |
| | | KAPKLLIYAASSLQSGVPSRFSGSGSGTDFTLTISSLQPGDFA |
| | | TYYCQQSYSTPRTFGQGTKLEIK |
| 1314 | M10 VL | EIVLTQSPGTLSLSPGERATLSCRASQSVRSSYLAWYQQKP |
| | | GQAPRLLIYGASSRATGIPDRFSGSGSGTDFTLTISRLEPEDF |
| | | AVYYCQQYGSSPTFGQGTRLEIK |
| 1315 | M11 VL | DIQMTQSPSTLSASVGDRVTITCRASQTISSWLAWYQQTPE |
| | | KAPKLLIYAASNLQSGVPSRFSGSGSGTEFTLTISSLQPDDFA |
| | | TYYCQQYHRSWTFGQGTKVEIT |
| 1316 | M12 VL | DVLMTQTPLSLPVSLGDQASISCRSSQNIVHSDGNTYLEWY |
| | | LQKPGQSPKLLIYKVSNRFSGVPDRFSGSGSGTDFTLKISRV |
| | | EAEDLGIYYCFQGSHVPLTFGAGTKLELK |
| 303 | Variable Light | EIVLTQSPGTLSLSPGERATLSC[LCDR1]WYQQKPGQAPRX |
| | | 10X11IY[LCDR2]GIPDRFSGSGSGTDFTLTISRLEPEDFAVYY |
| | | C[LCDR3 ]FGGGTKLEIK |
| | | wherein each of X10 and X11 is independently selected |
| | | from A, R, N, D, C, Q, E, G, H, I, L, K, M, F, P, S, T, |
| | | W, Y, or V |
| | | In some cases, X10 = L or P |
| | | In some cases, X11 = L or W |

TABLE 18A
Additional Sequences

| SEQ | | |
|---|---|---|
| ID | | |
| NO | Description | Sequence |
| 304 | 219 HC FR1, | [sequence omitted] |
| | 212 HC FR1 | |
| 305 | 219 HC FR2 | WVKQRPGQGLEWMG |
| 313 | 212 HC FR2 | WVRQRPGQGLEWIG |
| 1317 | HC FR2 | WVRQAPGQGLEWMG |
| 306 | 219 HC FR3a | RVTITRDTSTSTVYLELSSLRSEDTAVYYCAR |
| 307 | 219 HC FR3b | RVTITRDTSTSTVYLELSSLRSEDTAVYYC |
| 314 | 212 HC FR3a | RATITTDTSTSTAYLELSSLRSEDTAVYYCAR |
| 315 | 212 HC FR3b | RATITTDTSTSTAYLELSSLRSEDTAVYYC |
| 1318 | HC FR3 | RVTMTRDTSTSTVYMELSSLRSEDTAVYYC |
| 1319 | HC FR3 | RATITTDTSASTAYLQLSSLRSEDTAVYYC |
| 1320 | HC FR3 | RVTITRDTSASTVYMELSSLRSEDTAVYYC |
| 1321 | HC FR3 | RVTITRDTSASTAYMELSSLRSEDTAVYYC |
| 1322 | HC FR3 | RVTMTRDTSTSTVYMELSSLRSEDTAVYYCSR |
| 1323 | HC FR3 | RVTMTRDTSTSTVYMELSSLRSEDTAVYYCAR |
| 308 | 219 HC FR4, | WGQGTTVTVSS |
| | 212 HC FR4 | |
| 309 | 219 LC FR1, | EIVLTQSPGTLSLSPGERATLSC |
| | 212 LC FR1 | |
| 310 | 219 LC FR2, | WYQQKPGQAPRPLIY |
| | 212 LC FR2 | |
| 1324 | LC FR2 | WYQQKPGQAPRLLIY |
| 311 | 219 LC FR3, | GIPDRFSGSGSGTDFTLTISRLEPEDFAVYYC |
| | 212 LC FR3 | |
| 1325 | LC FR3 | GVPDRFSGSGSGTDYTLTISRLEPEDFAVYYC |
| 312 | 219 LC FR4, | FGGGTKLEIK |
| | 212 LC FR4 | |
| 316 | IGHV1-46*02 | QVQLVQSGAEVKKPGASVKVSCKASGYTFNSYYMHWVR |
| | | QAPGQGLEWMGIINPSGGSTSYAQKFQGRVTMTRDTSTST |
| | | VYMELSSLRSEDTAVYYCAR |
| 317 | IGKV3-20*01 | EIVLTQSPGTLSLSPGERATLSCRASQSVSSSYLAWYQQKPG |
| | | QAPRLLIYGASSRATGIPDRFSGSGSGTDFTLTISRLEPEDFA |
| | | VYYCQQYGSSP |
| 319 | Light Chain | RTVAAPSVFIFPPSDEQLKSGTASVVCLLNNFYPREAKVQW |
| | Constant | KVDNALQSGNSQESVTEQDSKDSTYSLSSTLTLSKADYEKH |
| | | KVYACEVTHQGLSSPVTKSFNRGEC |

TABLE 18B
Additional sequences

| SEQ | |
|---|---|
| ID | |
| NO | Sequence |
| 3001 | GFDIQDTYMH |
| 3002 | RIDPASGHTKYDPKFQV |
| 3003 | RIEPASGHIKYDPKFQG |
| 3005 | RIEPASGHIKYDPKFQV |
| 3006 | SGGLPDV |
| 3008 | SGGLPDW |
| 3010 | RASSSVSYMY |
| 3011 | ATSNLAS |
| 3012 | QQWEGNPRT |
| 3013 | QQWKGNPRT |
| 3116 | EVQLVQSGAEVKKPGASVKVSCKASGFDIQDTYMHWVKQAPGQGLEW |
| | MGRIEPASGHIKYDPKFQGRVTMTRDTSTSTVYMELSSLRSEDTAVYYC |
| | ARSGGLPDWWGQGTTVTVSS |
| 3121 | QVQLVQSGAEVKKPGASVKVSCKASGFDIQDTYMHWVRQAPGQGLEW |
| | MGRIEPASGHIKYDPKFQVRVTMTRDTSTSTVYMELSSLRSEDTAVYYC |
| | ARSGGLPDWWGQGTTVTVSS |
| 3122 | QVQLVQSGAEVKKPGASVKVSCKASGFDIQDTYMHWVRQAPGQGLEW |
| | MGRIEPASGHIKYDPKFQVRATMTRDTSTSTVYMELSSLRSEDTAVYYC |
| | ARSGGLPDWWGQGTTVTVSS |
| 3123 | QVQLVQSGAEVKKPGASVKVSCKASGFDIQDTYMHWVRQAPGQGLEW |
| | MGRIEPASGHIKYDPKFQVRVTITRDTSTSTVYMELSSLRSEDTAVYYCA |
| | RSGGLPDWWGQGTTVTVSS |
| 3124 | QVQLVQSGAEVKKPGASVKVSCKASGFDIQDTYMHWVRQAPGQGLEW |
| | MGRIEPASGHIKYDPKFQVRATITRDTSTSTVYMELSSLRSEDTAVYYCA |
| | RSGGLPDWWGQGTTVTVSS |
| 3125 | QVQLVQSGAEVKKPGASVKVSCKASGFDIQDTYMHWVKQAPGQGLEW |
| | MGRIEPASGHIKYDPKFQGRVTMTRDTSTSTVYMELSSLRSEDTAVYYC |
| | ARSGGLPDWWGQGTTVTVSS |
| 3128 | QVQLVQSGAEVKKPGASVKVSCKASGFDIQDTYMHWVRQAPGQGLEW |
| | MGRIEPASGHIKYDPKFQGRATMTRDTSTSTVYMELSSLRSEDTAVYYC |
| | ARSGGLPDWWGQGTTVTVSS |
| 3129 | EVQLVQSGAEVKKPGASVKVSCKASGFDIQDTYMHWVRQAPGQGLEW |
| | MGRIEPASGHIKYDPKFQGRATMTRDTSTSTVYMELSSLRSEDTAVYYC |
| | ARSGGLPDWWGQGTTVTVSS |
| 3131 | QVQLVQSGAEVKKPGASVKVSCKASGFDIQDTYMHWVRQAPGQGLEW |
| | MGRIEPASGHIKYDPKFQGRATITTDTSTSTVYMELSSLRSEDTAVYYCA |
| | RSGGLPDWWGQGTTVTVSS |
| 3133 | QVQLVQSGAEVKKPGASVKVSCKASGFDIQDTYMHWVRQAPGQGLEW |
| | MGRIEPASGHIKYDPKFQGRVTMTRDTSTSTAYMELSSLRSEDTAVYYC |
| | ARSGGLPDWWGQGTTVTVSS |
| 3134 | EVQLVQSGAEVKKPGASVKVSCKASGFDIQDTYMHWVRQAPGQGLEW |
| | MGRIEPASGHIKYDPKFQGRVTMTRDTSTSTAYMELSSLRSEDTAVYYC |
| | ARSGGLPDWWGQGTTVTVSS |
| 3136 | QVQLVQSGAEVKKPGASVKVSCKASGFDIQDTYMHWVRQAPGQGLEW |
| | MGRIDPASGHIKYDPKFQGRVTMTRDTSTSTAYMELSSLRSEDTAVYYC |
| | ARSGGLPDWWGQGTTVTVSS |
| 3137 | DVQLVQSGAEVKKPGASVKVSCKASGFDIQDTYMHWVRQAPGQGLEW |
| | MGRIEPASGHIKYDPKFQGRVTMTRDTSTSTVYMELSSLRSEDTAVYYC |
| | ARSGGLPDWWGQGTTVTVSS |
| 3138 | QVQLVQSGAEVKKPGASVKVSCKASGFDIQDTYMHWVKQAPGQGLEWI |
| | GRIDPASGHTKYDPKFQVRATITTDTSTSTAYLELSSLRSEDTAVYYCARS |
| | GGLPDVWGQGTTVTVSS |
| 3139 | QVQLVQSGAEVKKPGASVKVSCKASGFDIQDTYMHWVRQAPGQGLEWI |
| | GRIDPASGHTKYDPKFQVRATITTDTSTSTAYLELSSLRSEDTAVYYCARS |
| | GGLPDVWGQGTTVTVSS |
| 3151 | QVQLVQSGAEVKKPGASVKVSCKASGFDIQDTYMHWVRQAPGQGLEW |
| | MGRIDPASGHIKYDPKFQGRVTMTRDTSTSTVYMELSSLRSEDTAVYYC |
| | ARSGGLPDWWGQGTTVTVSS |
| 3152 | QVQLVQSGAEVKKPGASVKVSCKASGFDIQDTYMHWVRQAPGQGLEWI |
| | GRIEPASGHIKYDPKFQGRVTMTRDTSTSTVYMELSSLRSEDTAVYYCAR |
| | SGGLPDWWGQGTTVTVSS |
| 3153 | QVQLVQSGAEVKKPGASVKVSCKASGFDIQDTYMHWVRQAPGQGLEWI |
| | GRIDPASGHIKYDPKFQGRVTMTRDTSTSTVYMELSSLRSEDTAVYYCAR |
| | SGGLPDWWGQGTTVTVSS |
| 3154 | QVQLVQSGAEVKKPGASVKVSCKASGFDIQDTYMHWVRQAPGQGLEW |
| | MGRIEPASGHVKYDPKFQGRVTMTRDTSTSTVYMELSSLRSEDTAVYYC |
| | ARSGGLPDWWGQGTTVTVSS |
| 3155 | QVQLVQSGAEVKKPGASVKVSCKASGFDIQDTYMHWVRQAPGQGLEW |
| | MGRIEPASGHIKYDPKFQGRVTITRDTSTSTVYMELSSLRSEDTAVYYCA |
| | RSGGLPDWWGQGTTVTVSS |
| 3156 | EVQLVQSGAEVKKPGASVKVSCKASGFDIQDTYMHWVRQAPGQGLEW |
| | MGRIEPASGHIKYDPKFQGRVTMTRDTSTSTVYMELSSLRSEDTAVYYC |
| | ARSGGLPDWWGQGTTVTVSS |
| 3157 | QVQLVQSGAEVKKPGASVKVSCKASGFDIQDTYMHWVRQAPGQGLEW |
| | MGRIEPASGHIKYDPKFQGRVTMTTDTSTSTVYMELSSLRSEDTAVYYC |
| | ARSGGLPDWWGQGTTVTVSS |
| 3158 | QVQLVQSGAEVKKPGASVKVSCKASGFDIQDTYMHWVRQAPGQGLEW |
| | MGRIEPASGHIKYDPKFQGRVTITTDTSTSTVYMELSSLRSEDTAVYYCA |
| | RSGGLPDWWGQGTTVTVSS |
| 3159 | QVQLVQSGAEVKKPGASVKVSCKASGFDIQDTYMHWVRQAPGQGLEW |
| | MGRIEPASGHTKYDPKFQGRVTMTRDTSTSTVYMELSSLRSEDTAVYYC |
| | ARSGGLPDWWGQGTTVTVSS |
| 3160 | QVQLVQSGAEVKKPGASVKVSCKASGFDIQDTYMHWVRQAPGQGLEW |
| | MGRIEPASGHIKYDPKFQGRATITRDTSTSTVYMELSSLRSEDTAVYYCA |
| | RSGGLPDWWGQGTTVTVSS |
| 3161 | QVQLVQSGAEVKKPGASVKVSCKASGFDIQDTYMHWVRQAPGQGLEW |
| | MGRIEPASGHIKYDPKFQGRVTMTRDTSTSTVYLELSSLRSEDTAVYYCA |
| | RSGGLPDWWGQGTTVTVSS |
| 3162 | QVQLVQSGAEVKKPGASVKVSCKASGFDIQDTYMHWVRQAPGQGLEW |
| | MGRIEPASGHIKYDPKFQGRVTMTRDTSTSTAYLELSSLRSEDTAVYYCA |
| | RSGGLPDWWGQGTTVTVSS |
| 3168 | QVQLVQSGAEVKKPGASVKVSCKASGFDIQDTYMHWVRQAPGQGLEW |
| | MGRIDPASGHIKYDPKFQGRATITTDTSTSTVYMELSSLRSEDTAVYYCA |
| | RSGGLPDWWGQGTTVTVSS |
| 3169 | EVQLVQSGAEVKKPGASVKVSCKASGFDIQDTYMHWVRQAPGQGLEW |
| | MGRIEPASGHIKYDPKFQGRATITTDTSTSTVYMELSSLRSEDTAVYYCA |
| | RSGGLPDWWGQGTTVTVSS |
| 3202 | EIVLTQSPGTLSLSPGERATLSCRASSSVSYMYWYQQKPGQAPRLLIYATS |
| | NLASGIPDRFSGSGSGTDFTLTISRLEPEDFAVYYCQQWEGNPRTFGGGT |
| | KLEIK |
| 3204 | EIVLTQSPGTLSLSPGERATLSCRASSSVSYMYWYQQKPGQAPRLLIYATS |
| | NLASGIPDRFSGSGSGTDFTLTISRLEPEDFAVYYCQQWKGNPRTFGGGT |
| | KLEIK |
| 3205 | EIVLTQSPGTLSLSPGERATLSCRASSSVSYMYWYQQKPGQAPRPWIYAT |
| | SNLASGIPDRFSGSGSGTDFTLTISRLEPEDFAVYYCQQWEGNPRTFGGGT |
| | KLEIK |
| 3206 | EIVLTQSPGTLSLSPGERATLSCRASSSVSYMYWYQQKPGQAPRPLIYATS |
| | NLASGIPDRFSGSGSGTDFTLTISRLEPEDFAVYYCQQWKGNPRTFGGGT |
| | KLEIK |
| 3207 | EIVLTQSPGTLSLSPGERATLSCRASSSVSYMYWYQQKPGQAPRLLIYATS |
| | NLASGIPDRFSGSGSGTDFTLTISRLEPEDFAVYYCQQWSRNPRTFGGGTK |
| | LEIK |
| 3208 | EIVLTQSPGTLSASPGERATMSCRASSSVSYMYWYQQKPGQAPRPWIYA |
| | TSNLASGVPDRFSGSGSGTDYTLTISRVEPEDFAVYYCQQWSGNPRTFGG |
| | GTKLEIK |
| 3209 | EIVLTQSPGTLSLSPGERATLSCRASSSVSYMYWYQQKPGQAPRLLIYATS |
| | NLASGVPDRFSGSGSGTDFTLTISRLEPEDFAVYYCQQWEGNPRTFGGGT |
| | KLEIK |
| 3216 | EIVLTQSPGTLSLSPGERATLSCRASSSVSYMYWYQQKPGQAPRLLIYATS |
| | NLASGIPDRFSGSGSGTDYTLTISRLEPEDFAVYYCQQWEGNPRTFGGGT |
| | KLEIK |
| 3217 | EIVLTQSPGTLSLSPGERATLSCRASSSVSYMYWYQQKPGQAPRLLIYATS |
| | NLASGIPDRFSGSGSGTDFTLTISRVEPEDFAVYYCQQWEGNPRTFGGGT |
| | KLEIK |
| 3218 | EIVLTQSPGTLSLSPGERATLSCRASSSVSYMYWYQQKPGQAPRLLIYATS |
| | NLASGIPDRFSGSGSGTDYTLTISRVEPEDFAVYYCQQWEGNPRTFGGGT |
| | KLEIK |
| 3219 | EIVLTQSPGTLSASPGERATLSCRASSSVSYMYWYQQKPGQAPRLLIYAT |
| | SNLASGIPDRFSGSGSGTDFTLTISRLEPEDFAVYYCQQWEGNPRTFGGGT |
| | KLEIK |
| 3220 | EIVLTQSPGTMSLSPGERATLSCRASSSVSYMYWYQQKPGQAPRLLIYAT |
| | SNLASGIPDRFSGSGSGTDFTLTISRLEPEDFAVYYCQQWEGNPRTFGGGT |
| | KLEIK |
| 3319 | RTVAAPSVFIFPPSDEQLKSGTASVVCLLNNFYPREAKVQWKVDNALQS |
| | GNSQESVTEQDSKDSTYSLSSTLTLSKADYEKHKVYACEVTHQGLSSPVT |
| | KSFNRGEC |
| 3320 | ASTKGPSVFPLAPSSKSTSGGTAALGCLVKDYFPEPVTVSWNSGALTSGV |
| | HTFPAVLQSSGLYSLSSVVTVPSSSLGTQTYICNVNHKPSNTKVDKKVEP |
| | KSCDKTHTCPPCPAPELLGGPSVFLFPPKPKDTLMISRTPEVTCVVVDVSH |
| | EDPEVKFNWYVDGVEVHNAKTKPREEQYNSTYRVVSVLTVLHQDWLN |
| | GKEYKCKVSNKALPAPIEKTISKAKGQPREPQVYTLPPSRDELTKNQVSL |
| | TCLVKGFYPSDIAVEWESNGQPENNYKTTPPVLDSDGSFFLYSKLTVDKS |
| | RWQQGNVFSCSVMHEALHNHYTQKSLSLSPGK |

TABLE 19
Fc and Constant Regions

SEQ ID NO: 320 IgG1 Constant
[sequence omitted]
SEQ ID NO: 321 IgG1 Constant
ASTKGPSVFPLAPSSKSTSGGTAALGCLVKDYFPEPVTVSWNSGALTSGVHTFPAV
LQSSGLYSLSSVVTVPSSSLGTQTYICNVNHKPSNTKVDKRVEPKSCDKTHTCPPCP
APELLGGPSVFLFPPKPKDTLMISRTPEVTCVVVDVSHEDPEVKFNWYVDGVEVH
NAKTKPREEQYNSTYRVVSVLTVLHQDWLNGKEYKCKVSNKALPAPIEKTISKAK
GQPREPQVYTLPPSREEMTKNQVSLTCLVKGFYPSDIAVEWESNGQPENNYKTTPP
VLDSDGSFFLYSKLTVDKSRWQQGNVFSCSVMHEALHNHYTQKSLSLSPGK
SEQ ID NO: 322 IgG1 Constant
ASTKGPSVFPLAPSSKSTSGGTAALGCLVKDYFPEPVTVSWNSGALTSGVHTFPAV
LQSSGLYSLSSVVTVPSSSLGTQTYICNVNHKPSNTKVDKKVEPKSCDKTHTCPPC
PAPELLGGPSVFLFPPKPKDTLMISRTPEVTCVVVDVSHEDPEVKFNWYVDGVEV
HNAKTKPREEQYNSTYRVVSVLTVLHQDWLNGKEYKCKVSNKALPAPIEKTISKA
KGQPREPQVYTLPPSREEMTKNQVSLTCLVKGFYPSDIAVEWESNGQPENNYKTT
PPVLDSDGSFFLYSKLTVDKSRWQQGNVFSCSVMHEALHNHYTQKSLSLSPGK
SEQ ID NO: 323 Fc1 (L235E)
ASTKGPSVFPLAPSSKSTSGGTAALGCLVKDYFPEPVTVSWNSGALTSGVHTFPAV
LQSSGLYSLSSVVTVPSSSLGTQTYICNVNHKPSNTKVDKKVEPKSCDKTHTCPPC
PAPELEGGPSVFLFPPKPKDTLMISRTPEVTCVVVDVSHEDPEVKFNWYVDGVEV
HNAKTKPREEQYNSTYRVVSVLTVLHQDWLNGKEYKCKVSNKALPAPIEKTISKA
KGQPREPQVYTLPPSRDELTKNQVSLTCLVKGFYPSDIAVEWESNGQPENNYKTTP
PVLDSDGSFFLYSKLTVDKSRWQQGNVFSCSVMHEALHNHYTQKSLSLSPGK
SEQ ID NO: 324 Fc2 (L235E)
ASTKGPSVFPLAPSSKSTSGGTAALGCLVKDYFPEPVTVSWNSGALTSGVHTFPAV
LQSSGLYSLSSVVTVPSSSLGTQTYICNVNHKPSNTKVDKRVEPKSCDKTHTCPPCP
APELEGGPSVFLFPPKPKDTLMISRTPEVTCVVVDVSHEDPEVKFNWYVDGVEVH
NAKTKPREEQYNSTYRVVSVLTVLHQDWLNGKEYKCKVSNKALPAPIEKTISKAK
GQPREPQVYTLPPSREEMTKNQVSLTCLVKGFYPSDIAVEWESNGQPENNYKTTPP
VLDSDGSFFLYSKLTVDKSRWQQGNVFSCSVMHEALHNHYTQKSLSLSPGK
SEQ ID NO: 325 Fc3 (L235E)
ASTKGPSVFPLAPSSKSTSGGTAALGCLVKDYFPEPVTVSWNSGALTSGVHTFPAV
LQSSGLYSLSSVVTVPSSSLGTQTYICNVNHKPSNTKVDKKVEPKSCDKTHTCPPC
PAPELEGGPSVFLFPPKPKDTLMISRTPEVTCVVVDVSHEDPEVKFNWYVDGVEV
HNAKTKPREEQYNSTYRVVSVLTVLHQDWLNGKEYKCKVSNKALPAPIEKTISKA
KGQPREPQVYTLPPSREEMTKNQVSLTCLVKGFYPSDIAVEWESNGQPENNYKTT
PPVLDSDGSFFLYSKLTVDKSRWQQGNVFSCSVMHEALHNHYTQKSLSLSPGK
SEQ ID NO: 326 Fc4 (L234A, L235A)
ASTKGPSVFPLAPSSKSTSGGTAALGCLVKDYFPEPVTVSWNSGALTSGVHTFPAV
LQSSGLYSLSSVVTVPSSSLGTQTYICNVNHKPSNTKVDKKVEPKSCDKTHTCPPC
PAPEAAGGPSVFLFPPKPKDTLMISRTPEVTCVVVDVSHEDPEVKFNWYVDGVEV
HNAKTKPREEQYNSTYRVVSVLTVLHQDWLNGKEYKCKVSNKALPAPIEKTISKA
KGQPREPQVYTLPPSRDELTKNQVSLTCLVKGFYPSDIAVEWESNGQPENNYKTTP
PVLDSDGSFFLYSKLTVDKSRWQQGNVFSCSVMHEALHNHYTQKSLSLSPGK
SEQ ID NO: 327 Fc5 (L234A, L235A)
ASTKGPSVFPLAPSSKSTSGGTAALGCLVKDYFPEPVTVSWNSGALTSGVHTFPAV
LQSSGLYSLSSVVTVPSSSLGTQTYICNVNHKPSNTKVDKRVEPKSCDKTHTCPPCP
APEAAGGPSVFLFPPKPKDTLMISRTPEVTCVVVDVSHEDPEVKFNWYVDGVEVH
NAKTKPREEQYNSTYRVVSVLTVLHQDWLNGKEYKCKVSNKALPAPIEKTISKAK
GQPREPQVYTLPPSREEMTKNQVSLTCLVKGFYPSDIAVEWESNGQPENNYKTTPP
VLDSDGSFFLYSKLTVDKSRWQQGNVFSCSVMHEALHNHYTQKSLSLSPGK
SEQ ID NO: 328 Fc6 (L234A, L235A)
ASTKGPSVFPLAPSSKSTSGGTAALGCLVKDYFPEPVTVSWNSGALTSGVHTFPAV
LQSSGLYSLSSVVTVPSSSLGTQTYICNVNHKPSNTKVDKKVEPKSCDKTHTCPPC
PAPEAAGGPSVFLFPPKPKDTLMISRTPEVTCVVVDVSHEDPEVKFNWYVDGVEV
HNAKTKPREEQYNSTYRVVSVLTVLHQDWLNGKEYKCKVSNKALPAPIEKTISKA
KGQPREPQVYTLPPSREEMTKNQVSLTCLVKGFYPSDIAVEWESNGQPENNYKTT
PPVLDSDGSFFLYSKLTVDKSRWQQGNVFSCSVMHEALHNHYTQKSLSLSPGK
SEQ ID NO: 329 Fc7 (L234A, L235A, G237A)
ASTKGPSVFPLAPSSKSTSGGTAALGCLVKDYFPEPVTVSWNSGALTSGVHTFPAV
LQSSGLYSLSSVVTVPSSSLGTQTYICNVNHKPSNTKVDKKVEPKSCDKTHTCPPC
PAPEAAGAPSVFLFPPKPKDTLMISRTPEVTCVVVDVSHEDPEVKFNWYVDGVEV
HNAKTKPREEQYNSTYRVVSVLTVLHQDWLNGKEYKCKVSNKALPAPIEKTISKA
KGQPREPQVYTLPPSRDELTKNQVSLTCLVKGFYPSDIAVEWESNGQPENNYKTTP
PVLDSDGSFFLYSKLTVDKSRWQQGNVFSCSVMHEALHNHYTQKSLSLSPG
SEQ ID NO: 330 Fc8 (L234A, L235A, G237A)
ASTKGPSVFPLAPSSKSTSGGTAALGCLVKDYFPEPVTVSWNSGALTSGVHTFPAV
LQSSGLYSLSSVVTVPSSSLGTQTYICNVNHKPSNTKVDKRVEPKSCDKTHTCPPCP
APEAAGAPSVFLFPPKPKDTLMISRTPEVTCVVVDVSHEDPEVKFNWYVDGVEVH
NAKTKPREEQYNSTYRVVSVLTVLHQDWLNGKEYKCKVSNKALPAPIEKTISKAK
GQPREPQVYTLPPSREEMTKNQVSLTCLVKGFYPSDIAVEWESNGQPENNYKTTPP
VLDSDGSFFLYSKLTVDKSRWQQGNVFSCSVMHEALHNHYTQKSLSLSPG
SEQ ID NO: 331 Fc9 (L234A, L235A, G237A)
ASTKGPSVFPLAPSSKSTSGGTAALGCLVKDYFPEPVTVSWNSGALTSGVHTFPAV
LQSSGLYSLSSVVTVPSSSLGTQTYICNVNHKPSNTKVDKKVEPKSCDKTHTCPPC
PAPEAAGAPSVFLFPPKPKDTLMISRTPEVTCVVVDVSHEDPEVKFNWYVDGVEV
HNAKTKPREEQYNSTYRVVSVLTVLHQDWLNGKEYKCKVSNKALPAPIEKTISKA
KGQPREPQVYTLPPSREEMTKNQVSLTCLVKGFYPSDIAVEWESNGQPENNYKTT
PPVLDSDGSFFLYSKLTVDKSRWQQGNVFSCSVMHEALHNHYTQKSLSLSPG
SEQ ID NO: 332 Fc10 (L234A, L235A, P329G)
ASTKGPSVFPLAPSSKSTSGGTAALGCLVKDYFPEPVTVSWNSGALTSGVHTFPAV
LQSSGLYSLSSVVTVPSSSLGTQTYICNVNHKPSNTKVDKKVEPKSCDKTHTCPPC
PAPEAAGGPSVFLFPPKPKDTLMISRTPEVTCVVVDVSHEDPEVKFNWYVDGVEV
HNAKTKPREEQYNSTYRVVSVLTVLHQDWLNGKEYKCKVSNKALGAPIEKTISKA
KGQPREPQVYTLPPSRDELTKNQVSLTCLVKGFYPSDIAVEWESNGQPENNYKTTP
PVLDSDGSFFLYSKLTVDKSRWQQGNVFSCSVMHEALHNHYTQKSLSLSPGK
SEQ ID NO: 333 Fc11 (L234A, L235A, P329G)
ASTKGPSVFPLAPSSKSTSGGTAALGCLVKDYFPEPVTVSWNSGALTSGVHTFPAV
LQSSGLYSLSSVVTVPSSSLGTQTYICNVNHKPSNTKVDKRVEPKSCDKTHTCPPCP
APEAAGGPSVFLFPPKPKDTLMISRTPEVTCVVVDVSHEDPEVKFNWYVDGVEVH
NAKTKPREEQYNSTYRVVSVLTVLHQDWLNGKEYKCKVSNKALGAPIEKTISKAK
GQPREPQVYTLPPSREEMTKNQVSLTCLVKGFYPSDIAVEWESNGQPENNYKTTPP
VLDSDGSFFLYSKLTVDKSRWQQGNVFSCSVMHEALHNHYTQKSLSLSPGK
SEQ ID NO: 334 Fc12 (L234A, L235A, P329G)
ASTKGPSVFPLAPSSKSTSGGTAALGCLVKDYFPEPVTVSWNSGALTSGVHTFPAV
LQSSGLYSLSSVVTVPSSSLGTQTYICNVNHKPSNTKVDKKVEPKSCDKTHTCPPC
PAPEAAGGPSVFLFPPKPKDTLMISRTPEVTCVVVDVSHEDPEVKFNWYVDGVEV
HNAKTKPREEQYNSTYRVVSVLTVLHQDWLNGKEYKCKVSNKALGAPIEKTISKA
KGQPREPQVYTLPPSREEMTKNQVSLTCLVKGFYPSDIAVEWESNGQPENNYKTT
PPVLDSDGSFFLYSKLTVDKSRWQQGNVFSCSVMHEALHNHYTQKSLSLSPGK
SEQ ID NO: 335 Fc13 (L234F, L235E, P331S)
ASTKGPSVFPLAPSSKSTSGGTAALGCLVKDYFPEPVTVSWNSGALTSGVHTFPAV
LQSSGLYSLSSVVTVPSSSLGTQTYICNVNHKPSNTKVDKKVEPKSCDKTHTCPPC
PAPEFEGGPSVFLFPPKPKDTLMISRTPEVTCVVVDVSHEDPEVKFNWYVDGVEVH
NAKTKPREEQYNSTYRVVSVLTVLHQDWLNGKEYKCKVSNKALPASIEKTISKAK
GQPREPQVYTLPPSRDELTKNQVSLTCLVKGFYPSDIAVEWESNGQPENNYKTTPP
VLDSDGSFFLYSKLTVDKSRWQQGNVFSCSVMHEALHNHYTQKSLSLSPGK
SEQ ID NO: 336 Fc14 (L234F, L235E, P331S)
ASTKGPSVFPLAPSSKSTSGGTAALGCLVKDYFPEPVTVSWNSGALTSGVHTFPAV
LQSSGLYSLSSVVTVPSSSLGTQTYICNVNHKPSNTKVDKRVEPKSCDKTHTCPPCP
APEFEGGPSVFLFPPKPKDTLMISRTPEVTCVVVDVSHEDPEVKFNWYVDGVEVH
NAKTKPREEQYNSTYRVVSVLTVLHQDWLNGKEYKCKVSNKALPASIEKTISKAK
GQPREPQVYTLPPSREEMTKNQVSLTCLVKGFYPSDIAVEWESNGQPENNYKTTPP
VLDSDGSFFLYSKLTVDKSRWQQGNVFSCSVMHEALHNHYTQKSLSLSPGK
SEQ ID NO: 337 Fc15 (L234F, L235E, P331S)
ASTKGPSVFPLAPSSKSTSGGTAALGCLVKDYFPEPVTVSWNSGALTSGVHTFPAV
LQSSGLYSLSSVVTVPSSSLGTQTYICNVNHKPSNTKVDKKVEPKSCDKTHTCPPC
PAPEFEGGPSVFLFPPKPKDTLMISRTPEVTCVVVDVSHEDPEVKFNWYVDGVEVH
NAKTKPREEQYNSTYRVVSVLTVLHQDWLNGKEYKCKVSNKALPASIEKTISKAK
GQPREPQVYTLPPSREEMTKNQVSLTCLVKGFYPSDIAVEWESNGQPENNYKTTPP
VLDSDGSFFLYSKLTVDKSRWQQGNVFSCSVMHEALHNHYTQKSLSLSPGK
SEQ ID NO: 338 Fc16 (L234A, L235E, G237A)
ASTKGPSVFPLAPSSKSTSGGTAALGCLVKDYFPEPVTVSWNSGALTSGVHTFPAV
LQSSGLYSLSSVVTVPSSSLGTQTYICNVNHKPSNTKVDKKVEPKSCDKTHTCPPC
PAPEAEGAPSVFLFPPKPKDTLMISRTPEVTCVVVDVSHEDPEVKFNWYVDGVEV
HNAKTKPREEQYNSTYRVVSVLTVLHQDWLNGKEYKCKVSNKALPAPIEKTISKA
KGQPREPQVYTLPPSRDELTKNQVSLTCLVKGFYPSDIAVEWESNGQPENNYKTTP
PVLDSDGSFFLYSKLTVDKSRWQQGNVFSCSVMHEALHNHYTQKSLSLSPG
SEQ ID NO: 339 Fc17 (L234A, L235E, G237A)
ASTKGPSVFPLAPSSKSTSGGTAALGCLVKDYFPEPVTVSWNSGALTSGVHTFPAV
LQSSGLYSLSSVVTVPSSSLGTQTYICNVNHKPSNTKVDKRVEPKSCDKTHTCPPCP
APEAEGAPSVFLFPPKPKDTLMISRTPEVTCVVVDVSHEDPEVKFNWYVDGVEVH
NAKTKPREEQYNSTYRVVSVLTVLHQDWLNGKEYKCKVSNKALPAPIEKTISKAK
GQPREPQVYTLPPSREEMTKNQVSLTCLVKGFYPSDIAVEWESNGQPENNYKTTPP
VLDSDGSFFLYSKLTVDKSRWQQGNVFSCSVMHEALHNHYTQKSLSLSPG
SEQ ID NO: 340 Fc18 (L234A, L235E, G237A)
ASTKGPSVFPLAPSSKSTSGGTAALGCLVKDYFPEPVTVSWNSGALTSGVHTFPAV
LQSSGLYSLSSVVTVPSSSLGTQTYICNVNHKPSNTKVDKKVEPKSCDKTHTCPPC
PAPEAEGAPSVFLFPPKPKDTLMISRTPEVTCVVVDVSHEDPEVKFNWYVDGVEV
HNAKTKPREEQYNSTYRVVSVLTVLHQDWLNGKEYKCKVSNKALPAPIEKTISKA
KGQPREPQVYTLPPSREEMTKNQVSLTCLVKGFYPSDIAVEWESNGQPENNYKTT
PPVLDSDGSFFLYSKLTVDKSRWQQGNVFSCSVMHEALHNHYTQKSLSLSPG
SEQ ID NO: 341 Fc19 (L234A, L235E, G237A, P331S)
ASTKGPSVFPLAPSSKSTSGGTAALGCLVKDYFPEPVTVSWNSGALTSGVHTFPAV
LQSSGLYSLSSVVTVPSSSLGTQTYICNVNHKPSNTKVDKKVEPKSCDKTHTCPPC
PAPEAEGAPSVFLFPPKPKDTLMISRTPEVTCVVVDVSHEDPEVKFNWYVDGVEV
HNAKTKPREEQYNSTYRVVSVLTVLHQDWLNGKEYKCKVSNKALPASIEKTISKA
KGQPREPQVYTLPPSRDELTKNQVSLTCLVKGFYPSDIAVEWESNGQPENNYKTTP
PVLDSDGSFFLYSKLTVDKSRWQQGNVFSCSVMHEALHNHYTQKSLSLSPG
SEQ ID NO: 342 Fc20 (L234A, L235E, G237A, P331S)
ASTKGPSVFPLAPSSKSTSGGTAALGCLVKDYFPEPVTVSWNSGALTSGVHTFPAV
LQSSGLYSLSSVVTVPSSSLGTQTYICNVNHKPSNTKVDKRVEPKSCDKTHTCPPCP
APEAEGAPSVFLFPPKPKDTLMISRTPEVTCVVVDVSHEDPEVKFNWYVDGVEVH
NAKTKPREEQYNSTYRVVSVLTVLHQDWLNGKEYKCKVSNKALPASIEKTISKAK
GQPREPQVYTLPPSREEMTKNQVSLTCLVKGFYPSDIAVEWESNGQPENNYKTTPP
VLDSDGSFFLYSKLTVDKSRWQQGNVFSCSVMHEALHNHYTQKSLSLSPG
SEQ ID NO: 343 Fc21 (L234A, L235E, G237A, P331S)
ASTKGPSVFPLAPSSKSTSGGTAALGCLVKDYFPEPVTVSWNSGALTSGVHTFPAV
LQSSGLYSLSSVVTVPSSSLGTQTYICNVNHKPSNTKVDKKVEPKSCDKTHTCPPC
PAPEAEGAPSVFLFPPKPKDTLMISRTPEVTCVVVDVSHEDPEVKFNWYVDGVEV
HNAKTKPREEQYNSTYRVVSVLTVLHQDWLNGKEYKCKVSNKALPASIEKTISKA
KGQPREPQVYTLPPSREEMTKNQVSLTCLVKGFYPSDIAVEWESNGQPENNYKTT
PPVLDSDGSFFLYSKLTVDKSRWQQGNVFSCSVMHEALHNHYTQKSLSLSPG
SEQ ID NO: 344 Fc22 (L234A, L235A, P329A)
ASTKGPSVFPLAPSSKSTSGGTAALGCLVKDYFPEPVTVSWNSGALTSGVHTFPAV
LQSSGLYSLSSVVTVPSSSLGTQTYICNVNHKPSNTKVDKKVEPKSCDKTHTCPPC
PAPEAAGGPSVFLFPPKPKDTLMISRTPEVTCVVVDVSHEDPEVKFNWYVDGVEV
HNAKTKPREEQYNSTYRVVSVLTVLHQDWLNGKEYKCKVSNKALAAPIEKTISKA
KGQPREPQVYTLPPSRDELTKNQVSLTCLVKGFYPSDIAVEWESNGQPENNYKTTP
PVLDSDGSFFLYSKLTVDKSRWQQGNVFSCSVMHEALHNHYTQKSLSLSPGK
SEQ ID NO: 345 Fc23 (L234A, L235A, P329A)
ASTKGPSVFPLAPSSKSTSGGTAALGCLVKDYFPEPVTVSWNSGALTSGVHTFPAV
LQSSGLYSLSSVVTVPSSSLGTQTYICNVNHKPSNTKVDKRVEPKSCDKTHTCPPCP
APEAAGGPSVFLFPPKPKDTLMISRTPEVTCVVVDVSHEDPEVKFNWYVDGVEVH
NAKTKPREEQYNSTYRVVSVLTVLHQDWLNGKEYKCKVSNKALAAPIEKTISKAK
GQPREPQVYTLPPSREEMTKNQVSLTCLVKGFYPSDIAVEWESNGQPENNYKTTPP
VLDSDGSFFLYSKLTVDKSRWQQGNVFSCSVMHEALHNHYTQKSLSLSPGK
SEQ ID NO: 346 Fc24 (L234A, L235A, P329A)
ASTKGPSVFPLAPSSKSTSGGTAALGCLVKDYFPEPVTVSWNSGALTSGVHTFPAV
LQSSGLYSLSSVVTVPSSSLGTQTYICNVNHKPSNTKVDKKVEPKSCDKTHTCPPC
PAPEAAGGPSVFLFPPKPKDTLMISRTPEVTCVVVDVSHEDPEVKFNWYVDGVEV
HNAKTKPREEQYNSTYRVVSVLTVLHQDWLNGKEYKCKVSNKALAAPIEKTISKA
KGQPREPQVYTLPPSREEMTKNQVSLTCLVKGFYPSDIAVEWESNGQPENNYKTT
PPVLDSDGSFFLYSKLTVDKSRWQQGNVFSCSVMHEALHNHYTQKSLSLSPGK
SEQ ID NO: 347 Fc25 (D265A)
ASTKGPSVFPLAPSSKSTSGGTAALGCLVKDYFPEPVTVSWNSGALTSGVHTFPAV
LQSSGLYSLSSVVTVPSSSLGTQTYICNVNHKPSNTKVDKKVEPKSCDKTHTCPPC
PAPELLGGPSVFLFPPKPKDTLMISRTPEVTCVVVAVSHEDPEVKFNWYVDGVEV
HNAKTKPREEQYNSTYRVVSVLTVLHQDWLNGKEYKCKVSNKALPAPIEKTISKA
KGQPREPQVYTLPPSRDELTKNQVSLTCLVKGFYPSDIAVEWESNGQPENNYKTTP
PVLDSDGSFFLYSKLTVDKSRWQQGNVFSCSVMHEALHNHYTQKSLSLSPGK
SEQ ID NO: 348 Fc26 (D265A)
ASTKGPSVFPLAPSSKSTSGGTAALGCLVKDYFPEPVTVSWNSGALTSGVHTFPAV
LQSSGLYSLSSVVTVPSSSLGTQTYICNVNHKPSNTKVDKRVEPKSCDKTHTCPPCP
APELLGGPSVFLFPPKPKDTLMISRTPEVTCVVVAVSHEDPEVKFNWYVDGVEVH
NAKTKPREEQYNSTYRVVSVLTVLHQDWLNGKEYKCKVSNKALPAPIEKTISKAK
GQPREPQVYTLPPSREEMTKNQVSLTCLVKGFYPSDIAVEWESNGQPENNYKTTPP
VLDSDGSFFLYSKLTVDKSRWQQGNVFSCSVMHEALHNHYTQKSLSLSPGK
SEQ ID NO: 349 Fc27 (D265A)
ASTKGPSVFPLAPSSKSTSGGTAALGCLVKDYFPEPVTVSWNSGALTSGVHTFPAV
LQSSGLYSLSSVVTVPSSSLGTQTYICNVNHKPSNTKVDKKVEPKSCDKTHTCPPC
PAPELLGGPSVFLFPPKPKDTLMISRTPEVTCVVVAVSHEDPEVKFNWYVDGVEV
HNAKTKPREEQYNSTYRVVSVLTVLHQDWLNGKEYKCKVSNKALPAPIEKTISKA
KGQPREPQVYTLPPSREEMTKNQVSLTCLVKGFYPSDIAVEWESNGQPENNYKTT
PPVLDSDGSFFLYSKLTVDKSRWQQGNVFSCSVMHEALHNHYTQKSLSLSPGK
SEQ ID NO: 350 Fc28 (N297G)
ASTKGPSVFPLAPSSKSTSGGTAALGCLVKDYFPEPVTVSWNSGALTSGVHTFPAV
LQSSGLYSLSSVVTVPSSSLGTQTYICNVNHKPSNTKVDKKVEPKSCDKTHTCPPC
PAPELLGGPSVFLFPPKPKDTLMISRTPEVTCVVVDVSHEDPEVKFNWYVDGVEV
HNAKTKPREEQYGSTYRVVSVLTVLHQDWLNGKEYKCKVSNKALPAPIEKTISKA
KGQPREPQVYTLPPSRDELTKNQVSLTCLVKGFYPSDIAVEWESNGQPENNYKTTP
PVLDSDGSFFLYSKLTVDKSRWQQGNVFSCSVMHEALHNHYTQKSLSLSPGK
SEQ ID NO: 351 Fc29 (N297G)
ASTKGPSVFPLAPSSKSTSGGTAALGCLVKDYFPEPVTVSWNSGALTSGVHTFPAV
LQSSGLYSLSSVVTVPSSSLGTQTYICNVNHKPSNTKVDKRVEPKSCDKTHTCPPCP
APELLGGPSVFLFPPKPKDTLMISRTPEVTCVVVDVSHEDPEVKFNWYVDGVEVH
NAKTKPREEQYGSTYRVVSVLTVLHQDWLNGKEYKCKVSNKALPAPIEKTISKAK
GQPREPQVYTLPPSREEMTKNQVSLTCLVKGFYPSDIAVEWESNGQPENNYKTTPP
VLDSDGSFFLYSKLTVDKSRWQQGNVFSCSVMHEALHNHYTQKSLSLSPGK
SEQ ID NO: 352 Fc30 (N297G)
ASTKGPSVFPLAPSSKSTSGGTAALGCLVKDYFPEPVTVSWNSGALTSGVHTFPAV
LQSSGLYSLSSVVTVPSSSLGTQTYICNVNHKPSNTKVDKKVEPKSCDKTHTCPPC
PAPELLGGPSVFLFPPKPKDTLMISRTPEVTCVVVDVSHEDPEVKFNWYVDGVEV
HNAKTKPREEQYGSTYRVVSVLTVLHQDWLNGKEYKCKVSNKALPAPIEKTISKA
KGQPREPQVYTLPPSREEMTKNQVSLTCLVKGFYPSDIAVEWESNGQPENNYKTT
PPVLDSDGSFFLYSKLTVDKSRWQQGNVFSCSVMHEALHNHYTQKSLSLSPGK
SEQ ID NO: 353 Fc31 (D265A, N297A)
ASTKGPSVFPLAPSSKSTSGGTAALGCLVKDYFPEPVTVSWNSGALTSGVHTFPAV
LQSSGLYSLSSVVTVPSSSLGTQTYICNVNHKPSNTKVDKKVEPKSCDKTHTCPPC
PAPELLGGPSVFLFPPKPKDTLMISRTPEVTCVVVAVSHEDPEVKFNWYVDGVEV
HNAKTKPREEQYASTYRVVSVLTVLHQDWLNGKEYKCKVSNKALPAPIEKTISKA
KGQPREPQVYTLPPSRDELTKNQVSLTCLVKGFYPSDIAVEWESNGQPENNYKTTP
PVLDSDGSFFLYSKLTVDKSRWQQGNVFSCSVMHEALHNHYTQKSLSLSPGK
SEQ ID NO: 354 Fc32 (D265A, N297A)
ASTKGPSVFPLAPSSKSTSGGTAALGCLVKDYFPEPVTVSWNSGALTSGVHTFPAV
LQSSGLYSLSSVVTVPSSSLGTQTYICNVNHKPSNTKVDKRVEPKSCDKTHTCPPCP
APELLGGPSVFLFPPKPKDTLMISRTPEVTCVVVAVSHEDPEVKFNWYVDGVEVH
NAKTKPREEQYASTYRVVSVLTVLHQDWLNGKEYKCKVSNKALPAPIEKTISKAK
GQPREPQVYTLPPSREEMTKNQVSLTCLVKGFYPSDIAVEWESNGQPENNYKTTPP
VLDSDGSFFLYSKLTVDKSRWQQGNVFSCSVMHEALHNHYTQKSLSLSPGK
SEQ ID NO: 355 Fc33 (D265A, N297A)
ASTKGPSVFPLAPSSKSTSGGTAALGCLVKDYFPEPVTVSWNSGALTSGVHTFPAV
LQSSGLYSLSSVVTVPSSSLGTQTYICNVNHKPSNTKVDKKVEPKSCDKTHTCPPC
PAPELLGGPSVFLFPPKPKDTLMISRTPEVTCVVVAVSHEDPEVKFNWYVDGVEV
HNAKTKPREEQYASTYRVVSVLTVLHQDWLNGKEYKCKVSNKALPAPIEKTISKA
KGQPREPQVYTLPPSREEMTKNQVSLTCLVKGFYPSDIAVEWESNGQPENNYKTT
PPVLDSDGSFFLYSKLTVDKSRWQQGNVFSCSVMHEALHNHYTQKSLSLSPGK
SEQ ID NO: 356 Fc34 (D265A, N297G)
ASTKGPSVFPLAPSSKSTSGGTAALGCLVKDYFPEPVTVSWNSGALTSGVHTFPAV
LQSSGLYSLSSVVTVPSSSLGTQTYICNVNHKPSNTKVDKKVEPKSCDKTHTCPPC
PAPELLGGPSVFLFPPKPKDTLMISRTPEVTCVVVAVSHEDPEVKFNWYVDGVEV
HNAKTKPREEQYGSTYRVVSVLTVLHQDWLNGKEYKCKVSNKALPAPIEKTISKA
KGQPREPQVYTLPPSRDELTKNQVSLTCLVKGFYPSDIAVEWESNGQPENNYKTTP
PVLDSDGSFFLYSKLTVDKSRWQQGNVFSCSVMHEALHNHYTQKSLSLSPGK
SEQ ID NO: 357 Fc35 (D265A, N297G)
ASTKGPSVFPLAPSSKSTSGGTAALGCLVKDYFPEPVTVSWNSGALTSGVHTFPAV
LQSSGLYSLSSVVTVPSSSLGTQTYICNVNHKPSNTKVDKRVEPKSCDKTHTCPPCP
APELLGGPSVFLFPPKPKDTLMISRTPEVTCVVVAVSHEDPEVKFNWYVDGVEVH
NAKTKPREEQYGSTYRVVSVLTVLHQDWLNGKEYKCKVSNKALPAPIEKTISKAK
GQPREPQVYTLPPSREEMTKNQVSLTCLVKGFYPSDIAVEWESNGQPENNYKTTPP
VLDSDGSFFLYSKLTVDKSRWQQGNVFSCSVMHEALHNHYTQKSLSLSPGK
SEQ ID NO: 358 Fc36 (D265A, N297G)
ASTKGPSVFPLAPSSKSTSGGTAALGCLVKDYFPEPVTVSWNSGALTSGVHTFPAV
LQSSGLYSLSSVVTVPSSSLGTQTYICNVNHKPSNTKVDKKVEPKSCDKTHTCPPC
PAPELLGGPSVFLFPPKPKDTLMISRTPEVTCVVVAVSHEDPEVKFNWYVDGVEV
HNAKTKPREEQYGSTYRVVSVLTVLHQDWLNGKEYKCKVSNKALPAPIEKTISKA
KGQPREPQVYTLPPSREEMTKNQVSLTCLVKGFYPSDIAVEWESNGQPENNYKTT
PPVLDSDGSFFLYSKLTVDKSRWQQGNVFSCSVMHEALHNHYTQKSLSLSPGK
SEQ ID NO: 359 Fc37 (L235A, G237A)
ASTKGPSVFPLAPSSKSTSGGTAALGCLVKDYFPEPVTVSWNSGALTSGVHTFPAV
LQSSGLYSLSSVVTVPSSSLGTQTYICNVNHKPSNTKVDKKVEPKSCDKTHTCPPC
PAPELAGAPSVFLFPPKPKDTLMISRTPEVTCVVVDVSHEDPEVKFNWYVDGVEV
HNAKTKPREEQYNSTYRVVSVLTVLHQDWLNGKEYKCKVSNKALPAPIEKTISKA
KGQPREPQVYTLPPSRDELTKNQVSLTCLVKGFYPSDIAVEWESNGQPENNYKTTP
PVLDSDGSFFLYSKLTVDKSRWQQGNVFSCSVMHEALHNHYTQKSLSLSPGK
SEQ ID NO: 360 Fc38 (L235A, G237A)
ASTKGPSVFPLAPSSKSTSGGTAALGCLVKDYFPEPVTVSWNSGALTSGVHTFPAV
LQSSGLYSLSSVVTVPSSSLGTQTYICNVNHKPSNTKVDKRVEPKSCDKTHTCPPCP
APELAGAPSVFLFPPKPKDTLMISRTPEVTCVVVDVSHEDPEVKFNWYVDGVEVH
NAKTKPREEQYNSTYRVVSVLTVLHQDWLNGKEYKCKVSNKALPAPIEKTISKAK
GQPREPQVYTLPPSREEMTKNQVSLTCLVKGFYPSDIAVEWESNGQPENNYKTTPP
VLDSDGSFFLYSKLTVDKSRWQQGNVFSCSVMHEALHNHYTQKSLSLSPGK
SEQ ID NO: 361 Fc39 (L235A, G237A)
ASTKGPSVFPLAPSSKSTSGGTAALGCLVKDYFPEPVTVSWNSGALTSGVHTFPAV
LQSSGLYSLSSVVTVPSSSLGTQTYICNVNHKPSNTKVDKKVEPKSCDKTHTCPPC
PAPELAGAPSVFLFPPKPKDTLMISRTPEVTCVVVDVSHEDPEVKFNWYVDGVEV
HNAKTKPREEQYNSTYRVVSVLTVLHQDWLNGKEYKCKVSNKALPAPIEKTISKA
KGQPREPQVYTLPPSREEMTKNQVSLTCLVKGFYPSDIAVEWESNGQPENNYKTT
PPVLDSDGSFFLYSKLTVDKSRWQQGNVFSCSVMHEALHNHYTQKSLSLSPGK
SEQ ID NO: 362 Fc40 (IgG4)
ASTKGPSVFPLAPCSRSTSESTAALGCLVKDYFPEPVTVSWNSGALTSGVHTFPAV
LQSSGLYSLSSVVTVPSSSLGTKTYTCNVDHKPSNTKVDKRVESKYGPPCPSCPAP
EFLGGPSVFLFPPKPKDTLMISRTPEVTCVVVDVSQEDPEVQFNWYVDGVEVHNA
KTKPREEQFNSTYRVVSVLTVLHQDWLNGKEYKCKVSNKGLPSSIEKTISKAKGQ
PREPQVYTLPPSQEEMTKNQVSLTCLVKGFYPSDIAVEWESNGQPENNYKTTPPVL
DSDGSFFLYSRLTVDKSRWQEGNVFSCSVMHEALHNHYTQKSLSLSLGK
SEQ ID NO: 401 (L234A, L235A)
ASTKGPSVFPLAPSSKSTSGGTAALGCLVKDYFPEPVTVSWNSGALTSGVHTFPAV
LQSSGLYSLSSVVTVPSSSLGTQTYICNVNHKPSNTKVDKKVEPKSCDKTHTCPPC
PAPEAAGGPSVFLFPPKPKDTLMISRTPEVTCVVVDVSHEDPEVKFNWYVDGVEV
HNAKTKPREEQYNSTYRVVSVLTVLHQDWLNGKEYKCKVSNKALPAPIEKTISKA
KGQPREPQVYTLPPSRDELTKNQVSLTCLVKGFYPSDIAVEWESNGQPENNYKTTP
PVLDSDGSFFLYSKLTVDKSRWQQGNVFSCSVMHEALHNHYTQKSLSLSPGK
SEQ ID NO: 402 (L235E)
ASTKGPSVFPLAPSSKSTSGGTAALGCLVKDYFPEPVTVSWNSGALTSGVHTFPAV
LQSSGLYSLSSVVTVPSSSLGTQTYICNVNHKPSNTKVDKKVEPKSCDKTHTCPPC
PAPELEGGPSVFLFPPKPKDTLMISRTPEVTCVVVDVSHEDPEVKFNWYVDGVEV
HNAKTKPREEQYNSTYRVVSVLTVLHQDWLNGKEYKCKVSNKALPAPIEKTISKA
KGQPREPQVYTLPPSRDELTKNQVSLTCLVKGFYPSDIAVEWESNGQPENNYKTTP
PVLDSDGSFFLYSKLTVDKSRWQQGNVFSCSVMHEALHNHYTQKSLSLSPGK
SEQ ID NO: 403 (L234A, L235A, G237A)
ASTKGPSVFPLAPSSKSTSGGTAALGCLVKDYFPEPVTVSWNSGALTSGVHTFPAV
LQSSGLYSLSSVVTVPSSSLGTQTYICNVNHKPSNTKVDKKVEPKSCDKTHTCPPC
PAPEAAGAPSVFLFPPKPKDTLMISRTPEVTCVVVDVSHEDPEVKFNWYVDGVEV
HNAKTKPREEQYNSTYRVVSVLTVLHQDWLNGKEYKCKVSNKALPAPIEKTISKA
KGQPREPQVYTLPPSRDELTKNQVSLTCLVKGFYPSDIAVEWESNGQPENNYKTTP
PVLDSDGSFFLYSKLTVDKSRWQQGNVFSCSVMHEALHNHYTQKSLSLSPGK
SEQ ID NO: 404 (L234A, L235E, G237A)
ASTKGPSVFPLAPSSKSTSGGTAALGCLVKDYFPEPVTVSWNSGALTSGVHTFPAV
LQSSGLYSLSSVVTVPSSSLGTQTYICNVNHKPSNTKVDKKVEPKSCDKTHTCPPC
PAPEAEGAPSVFLFPPKPKDTLMISRTPEVTCVVVDVSHEDPEVKFNWYVDGVEV
HNAKTKPREEQYNSTYRVVSVLTVLHQDWLNGKEYKCKVSNKALPAPIEKTISKA
KGQPREPQVYTLPPSRDELTKNQVSLTCLVKGFYPSDIAVEWESNGQPENNYKTTP
PVLDSDGSFFLYSKLTVDKSRWQQGNVFSCSVMHEALHNHYTQKSLSLSPGK
SEQ ID NO: 405 (L234A, L235A, P329A)
ASTKGPSVFPLAPSSKSTSGGTAALGCLVKDYFPEPVTVSWNSGALTSGVHTFPAV
LQSSGLYSLSSVVTVPSSSLGTQTYICNVNHKPSNTKVDKKVEPKSCDKTHTCPPC
PAPEAAGGPSVFLFPPKPKDTLMISRTPEVTCVVVDVSHEDPEVKFNWYVDGVEV
HNAKTKPREEQYNSTYRVVSVLTVLHQDWLNGKEYKCKVSNKALAAPIEKTISKA
KGQPREPQVYTLPPSRDELTKNQVSLTCLVKGFYPSDIAVEWESNGQPENNYKTTP
PVLDSDGSFFLYSKLTVDKSRWQQGNVFSCSVMHEALHNHYTQKSLSLSPGK
SEQ ID NO: 406 (L234A, L235A, P329G)
ASTKGPSVFPLAPSSKSTSGGTAALGCLVKDYFPEPVTVSWNSGALTSGVHTFPAV
LQSSGLYSLSSVVTVPSSSLGTQTYICNVNHKPSNTKVDKKVEPKSCDKTHTCPPC
PAPEAAGGPSVFLFPPKPKDTLMISRTPEVTCVVVDVSHEDPEVKFNWYVDGVEV
HNAKTKPREEQYNSTYRVVSVLTVLHQDWLNGKEYKCKVSNKALAAPIEKTISKA
KGQPREPQVYTLPPSRDELTKNQVSLTCLVKGFYPSDIAVEWESNGQPENNYKTTP
PVLDSDGSFFLYSKLTVDKSRWQQGNVFSCSVMHEALHNHYTQKSLSLSPGK
SEQ ID NO: 407 (P329A)
ASTKGPSVFPLAPSSKSTSGGTAALGCLVKDYFPEPVTVSWNSGALTSGVHTFPAV
LQSSGLYSLSSVVTVPSSSLGTQTYICNVNHKPSNTKVDKKVEPKSCDKTHTCPPC
PAPEAAGGPSVFLFPPKPKDTLMISRTPEVTCVVVDVSHEDPEVKFNWYVDGVEV
HNAKTKPREEQYNSTYRVVSVLTVLHQDWLNGKEYKCKVSNKALAAPIEKTISKA
KGQPREPQVYTLPPSRDELTKNQVSLTCLVKGFYPSDIAVEWESNGQPENNYKTTP
PVLDSDGSFFLYSKLTVDKSRWQQGNVFSCSVMHEALHNHYTQKSLSLSPGK
SEQ ID NO: 408 (L234E, L235F, P331S)
ASTKGPSVFPLAPSSKSTSGGTAALGCLVKDYFPEPVTVSWNSGALTSGVHTFPAV
LQSSGLYSLSSVVTVPSSSLGTQTYICNVNHKPSNTKVDKKVEPKSCDKTHTCPPC
PAPEEFGGPSVFLFPPKPKDTLMISRTPEVTCVVVDVSHEDPEVKFNWYVDGVEV
HNAKTKPREEQYNSTYRVVSVLTVLHQDWLNGKEYKCKVSNKALPASIEKTISKA
KGQPREPQVYTLPPSRDELTKNQVSLTCLVKGFYPSDIAVEWESNGQPENNYKTTP
PVLDSDGSFFLYSKLTVDKSRWQQGNVFSCSVMHEALHNHYTQKSLSLSPGK
SEQ ID NO: 409 (D265A, N297G)
ASTKGPSVFPLAPSSKSTSGGTAALGCLVKDYFPEPVTVSWNSGALTSGVHTFPAV
LQSSGLYSLSSVVTVPSSSLGTQTYICNVNHKPSNTKVDKKVEPKSCDKTHTCPPC
PAPELLGGPSVFLFPPKPKDTLMISRTPEVTCVVVAVSHEDPEVKFNWYVDGVEV
HNAKTKPREEQYGSTYRVVSVLTVLHQDWLNGKEYKCKVSNKALPAPIEKTISKA
KGQPREPQVYTLPPSRDELTKNQVSLTCLVKGFYPSDIAVEWESNGQPENNYKTTP
PVLDSDGSFFLYSKLTVDKSRWQQGNVFSCSVMHEALHNHYTQKSLSLSPGK
SEQ ID NO: 410 (N297G)
ASTKGPSVFPLAPSSKSTSGGTAALGCLVKDYFPEPVTVSWNSGALTSGVHTFPAV
LQSSGLYSLSSVVTVPSSSLGTQTYICNVNHKPSNTKVDKKVEPKSCDKTHTCPPC
PAPELLGGPSVFLFPPKPKDTLMISRTPEVTCVVVDVSHEDPEVKFNWYVDGVEV
HNAKTKPREEQYGSTYRVVSVLTVLHQDWLNGKEYKCKVSNKALPAPIEKTISKA
KGQPREPQVYTLPPSRDELTKNQVSLTCLVKGFYPSDIAVEWESNGQPENNYKTTP
PVLDSDGSFFLYSKLTVDKSRWQQGNVFSCSVMHEALHNHYTQKSLSLSPGK
SEQ ID NO: 411 (S228P)
ASTKGPSVFPLAPCSRSTSESTAALGCLVKDYFPEPVTVSWNSGALTSGVHTFPAV
LQSSGLYSLSSVVTVPSSSLGTKTYTCNVDHKPSNTKVDKRVESKYGPPCPPCPAP
EFLGGPSVFLFPPKPKDTLMISRTPEVTCVVVDVSQEDPEVQFNWYVDGVEVHNA
KTKPREEQFNSTYRVVSVLTVLHQDWLNGKEYKCKVSNKGLPSSIEKTISKAKGQ
PREPQVYTLPPSQEEMTKNQVSLTCLVKGFYPSDIAVEWESNGQPENNYKTTPPVL
DSDGSFFLYSRLTVDKSRWQEGNVFSCSVMHEALHNHYTQKSLSLSLGK
SEQ ID NO: 412 (S228P, L235E)
ASTKGPSVFPLAPCSRSTSESTAALGCLVKDYFPEPVTVSWNSGALTSGVHTFPAV
LQSSGLYSLSSVVTVPSSSLGTKTYTCNVDHKPSNTKVDKRVESKYGPPCPPCPAP
EFEGGPSVFLFPPKPKDTLMISRTPEVTCVVVDVSQEDPEVQFNWYVDGVEVHNA
KTKPREEQFNSTYRVVSVLTVLHQDWLNGKEYKCKVSNKGLPSSIEKTISKAKGQ
PREPQVYTLPPSQEEMTKNQVSLTCLVKGFYPSDIAVEWESNGQPENNYKTTPPVL
DSDGSFFLYSRLTVDKSRWQEGNVFSCSVMHEALHNHYTQKSLSLSLGK
SEQ ID NO: 413 (S228P, F234A, L235A)
ASTKGPSVFPLAPCSRSTSESTAALGCLVKDYFPEPVTVSWNSGALTSGVHTFPAV
LQSSGLYSLSSVVTVPSSSLGTKTYTCNVDHKPSNTKVDKRVESKYGPPCPPCPAP
EAAGGPSVFLFPPKPKDTLMISRTPEVTCVVVDVSQEDPEVQFNWYVDGVEVHNA
KTKPREEQFNSTYRVVSVLTVLHQDWLNGKEYKCKVSNKGLPSSIEKTISKAKGQ
PREPQVYTLPPSQEEMTKNQVSLTCLVKGFYPSDIAVEWESNGQPENNYKTTPPVL
DSDGSFFLYSRLTVDKSRWQEGNVFSCSVMHEALHNHYTQKSLSLSLGK
SEQ ID NO: 501 (L234A, L235A)
QVQLVQSGAEVKKPGASVKVSCKASGFDIQDTYMHWVKQRPGQGLEWMGRIDP
ASGHTKYDPKFQVRVTITRDTSTSTVYLELSSLRSEDTAVYYCARSGGLPDVWGQ
GTTVTVSSASTKGPSVFPLAPSSKSTSGGTAALGCLVKDYFPEPVTVSWNSGALTS
GVHTFPAVLQSSGLYSLSSVVTVPSSSLGTQTYICNVNHKPSNTKVDKKVEPKSCD
KTHTCPPCPAPEAAGGPSVFLFPPKPKDTLMISRTPEVTCVVVDVSHEDPEVKFNW
YVDGVEVHNAKTKPREEQYNSTYRVVSVLTVLHQDWLNGKEYKCKVSNKALPA
PIEKTISKAKGQPREPQVYTLPPSRDELTKNQVSLTCLVKGFYPSDIAVEWESNGQP
ENNYKTTPPVLDSDGSFFLYSKLTVDKSRWQQGNVFSCSVMHEALHNHYTQKSLS
LSPGK
SEQ ID NO: 502 (L235E)
QVQLVQSGAEVKKPGASVKVSCKASGFDIQDTYMHWVKQRPGQGLEWMGRIDP
ASGHTKYDPKFQVRVTITRDTSTSTVYLELSSLRSEDTAVYYCARSGGLPDVWGQ
GTTVTVSSASTKGPSVFPLAPSSKSTSGGTAALGCLVKDYFPEPVTVSWNSGALTS
GVHTFPAVLQSSGLYSLSSVVTVPSSSLGTQTYICNVNHKPSNTKVDKKVEPKSCD
KTHTCPPCPAPELEGGPSVFLFPPKPKDTLMISRTPEVTCVVVDVSHEDPEVKFNW
YVDGVEVHNAKTKPREEQYNSTYRVVSVLTVLHQDWLNGKEYKCKVSNKALPA
PIEKTISKAKGQPREPQVYTLPPSRDELTKNQVSLTCLVKGFYPSDIAVEWESNGQP
ENNYKTTPPVLDSDGSFFLYSKLTVDKSRWQQGNVFSCSVMHEALHNHYTQKSLS
LSPGK
SEQ ID NO: 503 (L234A, L235A, G237A)
QVQLVQSGAEVKKPGASVKVSCKASGFDIQDTYMHWVKQRPGQGLEWMGRIDP
ASGHTKYDPKFQVRVTITRDTSTSTVYLELSSLRSEDTAVYYCARSGGLPDVWGQ
GTTVTVSSASTKGPSVFPLAPSSKSTSGGTAALGCLVKDYFPEPVTVSWNSGALTS
GVHTFPAVLQSSGLYSLSSVVTVPSSSLGTQTYICNVNHKPSNTKVDKKVEPKSCD
KTHTCPPCPAPEAAGAPSVFLFPPKPKDTLMISRTPEVTCVVVDVSHEDPEVKFNW
YVDGVEVHNAKTKPREEQYNSTYRVVSVLTVLHQDWLNGKEYKCKVSNKALPA
PIEKTISKAKGQPREPQVYTLPPSRDELTKNQVSLTCLVKGFYPSDIAVEWESNGQP
ENNYKTTPPVLDSDGSFFLYSKLTVDKSRWQQGNVFSCSVMHEALHNHYTQKSLS
LSPGK
SEQ ID NO: 504 (L234A, L235E, G237A)
QVQLVQSGAEVKKPGASVKVSCKASGFDIQDTYMHWVKQRPGQGLEWMGRIDP
ASGHTKYDPKFQVRVTITRDTSTSTVYLELSSLRSEDTAVYYCARSGGLPDVWGQ
GTTVTVSSASTKGPSVFPLAPSSKSTSGGTAALGCLVKDYFPEPVTVSWNSGALTS
GVHTFPAVLQSSGLYSLSSVVTVPSSSLGTQTYICNVNHKPSNTKVDKKVEPKSCD
KTHTCPPCPAPEAEGAPSVFLFPPKPKDTLMISRTPEVTCVVVDVSHEDPEVKFNW
YVDGVEVHNAKTKPREEQYNSTYRVVSVLTVLHQDWLNGKEYKCKVSNKALPA
PIEKTISKAKGQPREPQVYTLPPSRDELTKNQVSLTCLVKGFYPSDIAVEWESNGQP
ENNYKTTPPVLDSDGSFFLYSKLTVDKSRWQQGNVFSCSVMHEALHNHYTQKSLS
LSPGK
SEQ ID NO: 505 (L234A, L235A, P329A)
QVQLVQSGAEVKKPGASVKVSCKASGFDIQDTYMHWVKQRPGQGLEWMGRIDP
ASGHTKYDPKFQVRVTITRDTSTSTVYLELSSLRSEDTAVYYCARSGGLPDVWGQ
GTTVTVSSASTKGPSVFPLAPSSKSTSGGTAALGCLVKDYFPEPVTVSWNSGALTS
GVHTFPAVLQSSGLYSLSSVVTVPSSSLGTQTYICNVNHKPSNTKVDKKVEPKSCD
KTHTCPPCPAPEAAGGPSVFLFPPKPKDTLMISRTPEVTCVVVDVSHEDPEVKFNW
YVDGVEVHNAKTKPREEQYNSTYRVVSVLTVLHQDWLNGKEYKCKVSNKALAA
PIEKTISKAKGQPREPQVYTLPPSRDELTKNQVSLTCLVKGFYPSDIAVEWESNGQP
ENNYKTTPPVLDSDGSFFLYSKLTVDKSRWQQGNVFSCSVMHEALHNHYTQKSLS
LSPGK
SEQ ID NO: 506 (L234A, L235A, P329G)
QVQLVQSGAEVKKPGASVKVSCKASGFDIQDTYMHWVKQRPGQGLEWMGRIDP
ASGHTKYDPKFQVRVTITRDTSTSTVYLELSSLRSEDTAVYYCARSGGLPDVWGQ
GTTVTVSSASTKGPSVFPLAPSSKSTSGGTAALGCLVKDYFPEPVTVSWNSGALTS
GVHTFPAVLQSSGLYSLSSVVTVPSSSLGTQTYICNVNHKPSNTKVDKKVEPKSCD
KTHTCPPCPAPEAAGGPSVFLFPPKPKDTLMISRTPEVTCVVVDVSHEDPEVKFNW
YVDGVEVHNAKTKPREEQYNSTYRVVSVLTVLHQDWLNGKEYKCKVSNKALAA
PIEKTISKAKGQPREPQVYTLPPSRDELTKNQVSLTCLVKGFYPSDIAVEWESNGQP
ENNYKTTPPVLDSDGSFFLYSKLTVDKSRWQQGNVFSCSVMHEALHNHYTQKSLS
LSPGK
SEQ ID NO: 507 (P329A)
QVQLVQSGAEVKKPGASVKVSCKASGFDIQDTYMHWVKQRPGQGLEWMGRIDP
ASGHTKYDPKFQVRVTITRDTSTSTVYLELSSLRSEDTAVYYCARSGGLPDVWGQ
GTTVTVSSASTKGPSVFPLAPSSKSTSGGTAALGCLVKDYFPEPVTVSWNSGALTS
GVHTFPAVLQSSGLYSLSSVVTVPSSSLGTQTYICNVNHKPSNTKVDKKVEPKSCD
KTHTCPPCPAPEAAGGPSVFLFPPKPKDTLMISRTPEVTCVVVDVSHEDPEVKFNW
YVDGVEVHNAKTKPREEQYNSTYRVVSVLTVLHQDWLNGKEYKCKVSNKALAA
PIEKTISKAKGQPREPQVYTLPPSRDELTKNQVSLTCLVKGFYPSDIAVEWESNGQP
ENNYKTTPPVLDSDGSFFLYSKLTVDKSRWQQGNVFSCSVMHEALHNHYTQKSLS
LSPGK
SEQ ID NO: 508 (L234E, L235F, P331S)
QVQLVQSGAEVKKPGASVKVSCKASGFDIQDTYMHWVKQRPGQGLEWMGRIDP
ASGHTKYDPKFQVRVTITRDTSTSTVYLELSSLRSEDTAVYYCARSGGLPDVWGQ
GTTVTVSSASTKGPSVFPLAPSSKSTSGGTAALGCLVKDYFPEPVTVSWNSGALTS
GVHTFPAVLQSSGLYSLSSVVTVPSSSLGTQTYICNVNHKPSNTKVDKKVEPKSCD
KTHTCPPCPAPEEFGGPSVFLFPPKPKDTLMISRTPEVTCVVVDVSHEDPEVKFNW
YVDGVEVHNAKTKPREEQYNSTYRVVSVLTVLHQDWLNGKEYKCKVSNKALPA
SIEKTISKAKGQPREPQVYTLPPSRDELTKNQVSLTCLVKGFYPSDIAVEWESNGQP
ENNYKTTPPVLDSDGSFFLYSKLTVDKSRWQQGNVFSCSVMHEALHNHYTQKSLS
LSPGK
SEQ ID NO: 509 (D265A, N297G)
QVQLVQSGAEVKKPGASVKVSCKASGFDIQDTYMHWVKQRPGQGLEWMGRIDP
ASGHTKYDPKFQVRVTITRDTSTSTVYLELSSLRSEDTAVYYCARSGGLPDVWGQ
GTTVTVSSASTKGPSVFPLAPSSKSTSGGTAALGCLVKDYFPEPVTVSWNSGALTS
GVHTFPAVLQSSGLYSLSSVVTVPSSSLGTQTYICNVNHKPSNTKVDKKVEPKSCD
KTHTCPPCPAPELLGGPSVFLFPPKPKDTLMISRTPEVTCVVVAVSHEDPEVKFNW
YVDGVEVHNAKTKPREEQYGSTYRVVSVLTVLHQDWLNGKEYKCKVSNKALPA
PIEKTISKAKGQPREPQVYTLPPSRDELTKNQVSLTCLVKGFYPSDIAVEWESNGQP
ENNYKTTPPVLDSDGSFFLYSKLTVDKSRWQQGNVFSCSVMHEALHNHYTQKSLS
LSPGK
SEQ ID NO: 510 (N297G)
QVQLVQSGAEVKKPGASVKVSCKASGFDIQDTYMHWVKQRPGQGLEWMGRIDP
ASGHTKYDPKFQVRVTITRDTSTSTVYLELSSLRSEDTAVYYCARSGGLPDVWGQ
GTTVTVSSASTKGPSVFPLAPSSKSTSGGTAALGCLVKDYFPEPVTVSWNSGALTS
GVHTFPAVLQSSGLYSLSSVVTVPSSSLGTQTYICNVNHKPSNTKVDKKVEPKSCD
KTHTCPPCPAPELLGGPSVFLFPPKPKDTLMISRTPEVTCVVVDVSHEDPEVKFNW
YVDGVEVHNAKTKPREEQYGSTYRVVSVLTVLHQDWLNGKEYKCKVSNKALPA
PIEKTISKAKGQPREPQVYTLPPSRDELTKNQVSLTCLVKGFYPSDIAVEWESNGQP
ENNYKTTPPVLDSDGSFFLYSKLTVDKSRWQQGNVFSCSVMHEALHNHYTQKSLS
LSPGK
SEQ ID NO: 511 (S228P)
QVQLVQSGAEVKKPGASVKVSCKASGFDIQDTYMHWVKQRPGQGLEWMGRIDP
ASGHTKYDPKFQVRVTITRDTSTSTVYLELSSLRSEDTAVYYCARSGGLPDVWGQ
GTTVTVSSASTKGPSVFPLAPCSRSTSESTAALGCLVKDYFPEPVTVSWNSGALTS
GVHTFPAVLQSSGLYSLSSVVTVPSSSLGTKTYTCNVDHKPSNTKVDKRVESKYGP
PCPPCPAPEFLGGPSVFLFPPKPKDTLMISRTPEVTCVVVDVSQEDPEVQFNWYVD
GVEVHNAKTKPREEQFNSTYRVVSVLTVLHQDWLNGKEYKCKVSNKGLPSSIEKT
ISKAKGQPREPQVYTLPPSQEEMTKNQVSLTCLVKGFYPSDIAVEWESNGQPENNY
KTTPPVLDSDGSFFLYSRLTVDKSRWQEGNVFSCSVMHEALHNHYTQKSLSLSLG
K
SEQ ID NO: 512 (S228P, L235E)
QVQLVQSGAEVKKPGASVKVSCKASGFDIQDTYMHWVKQRPGQGLEWMGRIDP
ASGHTKYDPKFQVRVTITRDTSTSTVYLELSSLRSEDTAVYYCARSGGLPDVWGQ
GTTVTVSSASTKGPSVFPLAPCSRSTSESTAALGCLVKDYFPEPVTVSWNSGALTS
GVHTFPAVLQSSGLYSLSSVVTVPSSSLGTKTYTCNVDHKPSNTKVDKRVESKYGP
PCPPCPAPEFEGGPSVFLFPPKPKDTLMISRTPEVTCVVVDVSQEDPEVQFNWYVD
GVEVHNAKTKPREEQFNSTYRVVSVLTVLHQDWLNGKEYKCKVSNKGLPSSIEKT
ISKAKGQPREPQVYTLPPSQEEMTKNQVSLTCLVKGFYPSDIAVEWESNGQPENNY
KTTPPVLDSDGSFFLYSRLTVDKSRWQEGNVFSCSVMHEALHNHYTQKSLSLSLG
K
SEQ ID NO: 513 (S228P, F234A, L235A)
QVQLVQSGAEVKKPGASVKVSCKASGFDIQDTYMHWVKQRPGQGLEWMGRIDP
ASGHTKYDPKFQVRVTITRDTSTSTVYLELSSLRSEDTAVYYCARSGGLPDVWGQ
GTTVTVSSASTKGPSVFPLAPCSRSTSESTAALGCLVKDYFPEPVTVSWNSGALTS
GVHTFPAVLQSSGLYSLSSVVTVPSSSLGTKTYTCNVDHKPSNTKVDKRVESKYGP
PCPPCPAPEAAGGPSVFLFPPKPKDTLMISRTPEVTCVVVDVSQEDPEVQFNWYVD
GVEVHNAKTKPREEQFNSTYRVVSVLTVLHQDWLNGKEYKCKVSNKGLPSSIEKT
ISKAKGQPREPQVYTLPPSQEEMTKNQVSLTCLVKGFYPSDIAVEWESNGQPENNY
KTTPPVLDSDGSFFLYSRLTVDKSRWQEGNVFSCSVMHEALHNHYTQKSLSLSLG
K
SEQ ID NO: 514
EIVLTQSPGTLSLSPGERATLSCRASSSVSYMYWYQQKPGQAPRPLIYATSNLASGI
PDRFSGSGSGTDFTLTISRLEPEDFAVYYCQQWEGNPRTFGGGTKLEIKRTVAAPS
VFIFPPSDEQLKSGTASVVCLLNNFYPREAKVQWKVDNALQSGNSQESVTEQDSK
DSTYSLSSTLTLSKADYEKHKVYACEVTHQGLSSPVTKSFNRGEC
SEQ ID NO: 515 G2 constant domain
ASTKGPSVFPLAPCSRSTSESTAALGCLVKDYFPEPVTVSWNSGALTSGVHTFPAV
LQSSGLYSLSSVVTVPSSNFGTQTYTCNVDHKPSNTKVDKTVERKCCVECPPCPAP
PVAGPSVFLFPPKPKDTLMISRTPEVTCVVVDVSHEDPEVQFNWYVDGVEVHNAK
TKPREEQFNSTFRVVSVLTVVHQDWLNGKEYKCKVSNKGLPAPIEKTISKTKGQP
REPQVYTLPPSREEMTKNQVSLTCLVKGFYPSDIAVEWESNGQPENNYKTTPPML
DSDGSFFLYSKLTVDKSRWQQGNVFSCSVMHEALHNHYTQKSLSLSPGK

TABLE 20
Select Antibodies

| | Heavy Chain CDR | Light Chain CDR |
|---|---|---|
| | SEQ ID NOS | SEQ ID NOS |
| Antibody | (CDR1, CDR2, CDR3) | (CDR1, CDR2, CDR3) |
| A | 1, 2, 6 | 10, 11, 12 |
| B | 1, 3, 8 | 10, 11, 12 |
| C | 1, 4, 8 | 10, 11, 12 |
| D | 1, 2, 6 | 10, 11, 13 |
| E | 1, 2, 6 | 10, 11, 14 |
| F | 1, 5, 8 | 10, 11, 12 |
| G | 1, 5, 8 | 10, 11, 13 |
| H | 1, 3, 8 | 10, 11, 13 |
| A2 | 1, 2, 7 | 10, 11, 12 |
| B2 | 1, 3, 9 | 10, 11, 12 |
| C2 | 1, 4, 9 | 10, 11, 12 |
| D2 | 1, 2, 7 | 10, 11, 13 |
| E2 | 1, 2, 7 | 10, 11, 14 |
| F2 | 1, 5, 9 | 10, 11, 12 |
| G2 | 1, 5, 9 | 10, 11, 13 |
| H2 | 1, 3, 9 | 10, 11, 13 |
| I | 1, 5, 8 | 10, 11, 15 |
| I2 | 1, 5, 9 | 10, 11, 15 |

TABLE 21
Select Antibodies-Variable Regions

| | Heavy Chain | Light Chain |
|---|---|---|
| | Variable Region | Variable Region |
| Antibody | SEQ ID NO | SEQ ID NOS |
| 15 | 108 | 203 |
| 30 | 108 | 204 |
| 64 | 121 | 202 |
| 67 | 122 | 202 |
| 68 | 123 | 202 |
| 75 | 131 | 205 |
| 94 | 124 | 202 |
| 96 | 128 | 205 |
| 100 | 107 | 204 |
| 103 | 120 | 204 |
| 107 | 108 | 202 |
| 109 | 133 | 205 |
| 110 | 125 | 205 |
| 112 | 117 | 205 |
| 113 | 124 | 205 |
| 115 | 122 | 205 |
| 122 | 113 | 204 |
| 125 | 105 | 204 |
| 126 | 114 | 204 |
| 127 | 118 | 204 |
| 129 | 110 | 204 |
| 132 | 128 | 206 |
| 134 | 122 | 206 |
| 138 | 122 | 204 |
| 147 | 117 | 201 |
| 148 | 121 | 201 |
| 149 | 122 | 201 |
| 151 | 124 | 201 |
| 157 | 104 | 204 |
| 158 | 101 | 204 |
| 159 | 119 | 204 |
| 160 | 102 | 204 |
| 169 | 126 | 205 |
| 170 | 135 | 205 |
| 172 | 130 | 205 |
| 173 | 127 | 205 |
| 174 | 132 | 205 |
| 175 | 126 | 201 |
| 178 | 130 | 201 |
| 179 | 127 | 201 |
| 180 | 132 | 201 |
| 181 | 107 | 202 |
| 188 | 115 | 202 |
| 196 | 129 | 205 |
| 197 | 116 | 205 |
| 198 | 134 | 205 |
| 199 | 109 | 201 |
| 200 | 103 | 201 |
| 203 | 116 | 201 |
| 205 | 109 | 202 |
| 211 | 108 | 201 |
| 212 | 107 | 201 |
| 213 | 106 | 201 |
| 214 | 111 | 201 |
| 216 | 112 | 201 |
| 217 | 101 | 201 |
| 218 | 119 | 201 |
| 219 | 104 | 201 |
| 220 | 102 | 201 |
| 221 | 105 | 201 |
| 222 | 114 | 201 |
| 223 | 103 | 202 |
| 500 | 301 | 303 |
| 501 | 302 | 303 |

### Example 17: Design of Humanized Anti-TL1A Antibodies with Reduced Cell-Mediated Cytotoxicity

[1744] As provided and described herein, Fc variants (e.g. SEQ ID NOs: 401-413) were designed to diminish effector function and subsequently tested for the ability to (i) effectively be purified/manufactured (Table 22), (ii) reduce antibody-dependent cell-mediated cytotoxicity (ADCC), and (iii) reduce complement-dependent cytotoxicity. Test articles tested comprise heavy chain SEQ ID NOs: 501-513, comprising Fc regions that comprises SEQ ID NOs: 401-413, respectively. Heavy chains used were paired with a light chain comprising SEQ ID NO: 514. ELISA titration profiles and EC50s were generated against recombinant TL1A antigen (“EC50”, Table 23). Interestingly, Fc mutations did affect purity, as measured by monomer content, for select mutations/Fc variants (Table 22, wild-type IgG1 control).

### Reduction of CDC Activity

[1745] Test articles were evaluated for CDC activity, compared to negative control Human IgG4 isotype control, on TL1A-expressing HEK293 target cells. Rituxan (anti-CD20) was used as a positive technical control on CD20-expressing Raji cell. All test articles were used at a final top concentration of 10 μg/mL followed by a five-fold dilution series (7 points total), in addition to a no treatment control, in triplicate. Cells were incubated with test articles for 15 minutes at 37 C, then treated with human complement, at a final concentration of 25%, for 3 hours at 37 C, 5% CO2. Following incubation, cells were washed and resuspended in Propidium Iodide (P.I.) at a final concentration of 5 μg/mL prior to flow cytometry analysis. Total cells were examined by flow cytometry during sample acquisition. Data were plotted on an XY chart, graphing percentage P.I. positive cells against the log of the concentration and fit to a non-linear regression curve. Cell cytotoxicity in the presence of all test articles was not distinguishable from cell cytotoxicity in the presence of isotype control (Table 23). CDC bioactivity was observed on Raji target cells with Rituxan treatment.

### Reduction of CDC Activity

[1746] An antibody-dependent cell-mediated cytotoxicity (ADCC) reporter assay was performed for the characterization of test articles and IgG4 Isotype control on HEK 293 TL1A cells. A reporter cell line engineered to express human Fc-gamma-RIIIa V158 (high affinity) served as effector cells.

[1747] Prometheus test articles were evaluated with a top concentration of 10 ug/mL (log dilution for 7 points total, in addition to no test article control). Treatment conditions were tested in triplicate, effector and target cells were co-cultured for 6 hours at 37 C with 5% CO2. Raji target cells were used as a positive control, with Rituxan treatment at a top concentration of 10 ug/mL, 7-point log dilution series, and no treatment control. Test article 502 treatment resulted in dose-dependent increase in luciferase reporter gene activity, and 5044 treatment resulted in increase of reporter activity at the highest tested concentration. The rest of the test articles did not induce reporter activity (Table 23).

TABLE 22

| | | Heavy | | | | |
|---|---|---|---|---|---|---|
| | | Chain | | | Purity | |
| | Fc SEQ | SEQ | | | SDS- | SEC- |
| Class | ID NO | ID NO | mg/mL | mg | PAGE | HPLC |
| IgG1, | 401 | 501 | 2.65 | 10.60 | 95% | 90% |
| protein | 402 | 502 | 1.15 | 12.65 | 95% | 92% |
| variants | 403 | 503 | 3.22 | 10.62 | 90% | 89% |
| | 404 | 504 | 1.61 | 11.27 | 95% | 92% |
| | 405 | 505 | 3.43 | 10.29 | 95% | 91% |
| | 406 | 506 | 1.51 | 15.10 | 95% | 93% |
| | 407 | 507 | 2.85 | 11.40 | 95% | 92% |
| | 408 | 508 | 1.55 | 10.85 | 95% | 92% |
| IgG1, glycan | 409 | 509 | 2.33 | 9.32 | 90% | 90% |
| knock-out | 410 | 510 | 1.36 | 12.24 | 95% | 92% |
| IgG4 | 411 | 511 | 1.78 | 19.58 | 95% | 82% |
| | 412 | 512 | 2.33 | 18.64 | 90% | 81% |
| | 413 | 513 | 5.08 | 15.24 | 95% | 90% |
| Control | — | — | 3.70 | 5.55 | 95% | 97% |

TABLE 23

| | Fc SEQ | Heavy Chain | EC50 | | |
|---|---|---|---|---|---|
| Class | ID NO | SEQ ID NO | (nM) | ADCC | CDC |
| IgG1, protein | 401 | 501 | 0.222 | ND | ND |
| variants | 402 | 502 | 0.215 | 100 ng/ml | ND |
| | 403 | 503 | 0.188 | ND | ND |
| | 404 | 504 | 0.220 | 10 ug/mL | ND |
| | 405 | 505 | 0.346 | ND | ND |
| | 406 | 506 | 0.347 | ND | ND |
| | 407 | 507 | 0.329 | ND | ND |
| | 408 | 508 | 0.330 | ND | ND |
| IgG1, glycan | 409 | 509 | 0.340 | ND | ND |
| knock-out | 410 | 510 | 0.293 | ND | ND |
| IgG4 | 411 | 511 | 0.299 | ND | ND |
| | 412 | 512 | 0.324 | ND | ND |
| | 413 | 513 | 0.252 | ND | ND |

### Example 18: Biophysical Properties of Anti-Tl1a Antibodies at High Concentrations

[1748] The data for A219 anti-TL1A antibody properties in solution were analyzed together using a chemometric method termed partial least squares (PLS). Detailed descriptions of PLS modeling have been published in, for example, Katz, M. H. Multivariate Analysis: A Practice Guide for Clinicians. Cambridge University Press, New York, pp. 158-162 (1999); Stahle, L., Wold, K., Multivariate data analysis and experimental design in biomedical research. Prog. Med Chem. 1988, 25: 291-338; Wold S. PLS-regression: a basic tool of chemometrics. Chemom. Intell. Lab. Syst. 2001, 58: 109-130; and Martens, H.; Martens, M. Multivariate Analysis of Quality: An Introduction, Wiley and Sons, Chichester, UK (2001).

[1749] FIGS. 9A-9C demonstrate viscosity as a function of antibody concentration and pH. Antibody concentration ranged from greater than about 125 mg/mL to greater than about 170 mg/mL. pH ranged from less than 5.0 to about 7.5. Concentration dependence is evident, with very low viscosities (e.g. as indicated by a viscosity less than 5 mPa-s or 7 mPa-s). The viscosity was measured using an m-VROC™ viscometer by Rheosense with an A10 chip. The shear rates employed were about 1820 s-1. The viscometer was temperature controlled using a ThermoCube thermoelectric chiller and the samples were delivered using a Hamilton 100 μL syringe (81060). The accuracy of the instrument was verified using neat Isopropyl alcohol and measured at 25° C. Furthermore, across the concentration range tested, the percent increase in the HMW fraction as measured by size exclusion chromatography ranged from 0% to a 1.3% increase. HMW as used herein refers to high molecular weight antibody fraction, e.g., aggregated protein, and which excludes monomeric antibody.

[1750] The foregoing description of various embodiments known to the applicant at this time of filing the application has been presented and is intended for the purposes of illustration and description. The present description is not intended to be exhaustive nor limited to the precise form disclosed and many modifications and variations are possible in the light of the above teachings. The embodiments described serve to explain principles and practical applications, and to enable others skilled in the art to utilize the various embodiments, optionally with various modifications, as are suited to the particular use contemplated. Therefore, it is intended that the disclosure not be limited to the particular embodiments disclosed.

TABLE 24
Additional Sequences

| SEQ ID | Sequence |
|---|---|
| 2001 | CATTCTGCAG CAGGGACAGA AGCCTGGGAA GTTGAGTCCA |
| | CGAAGAGGGT TCTCGGACTC CCTTCCCTAA GCGAGTGACT |
| | GATGTTTCCT GACTCTGGCC CTGGTTGTGC CGTGAGGCCA |
| | CAGTGAGGGC AGCTGGAGAG CTCAGGATCT GCCACCTTAG |
| | CACACATGGG ATGTTAGGCA CTTCTCGCTA TGCCTCAGTT |
| | TCTGTGGTCT CATGAAGGAA CATTAGTACT TTCTTCATTA |
| | ATGCACATAA AATGCTTGGC AGTGCTTGGC ATAGAGATAG |
| | ATGCTCAATA AATGTTGGCC ACTATTATTA TAGCCCCCTA |
| | CAAACAAGGA GGATGAGATT GAAAACAATG TTTCCTAAAA |
| | ATGAGGGTAT AATGGGCATC CTATCCATAT TTCAGGGGTA |
| | GGAAAACAGC CTTCTGAGAT CATTTATATG AAGGGTATGG |
| | ATGGACAAAT CCTTATCAGC CTAAAATATT CCTATCTATG |
| | ATTGCTATGT CATTTCTTTA R GATTAATCAA TCCTCTTCAT |
| | GAGTCATATT TCAATATATT ACACATACAC ATAATTATAA |
| | AAGAACCAAG TTGCATAAAA TTTATAAAAT GGAGACTAGG |
| | AAAGGAAAAA CCCGCTCATA AAACCCAACA AGAGAGCTTA |
| | AAATGAAAGT CTGAAAGTGC AGGTAGGTAT TTGTTTAAAT |
| | ACTTGGTAAA AGAAAATGTT CAATTCAGTA GCTGTGACAG |
| | ACACAATTTT AAGGGGTGTG GGCATAAGAG AAACAGAAAG |
| | TCCATCTGTC AAAGGGGTAA ATATTTAGTC AAGTCTTAGA |
| | TAGTATTTCT GTAAACAGAA ATTTCAATGG AAAATTTCCA |
| | ACCTGAGAGC AAATAATTTA AGATGGGTTT AATATAAGAA |
| | TTAAAGCTCT CGTCTCCATG TCGCTGCCCA GCCTGAGACC |
| | CAGCCCTCTG AGTCCTTGTG GCAGTTCGGC TTTTTCTTTC |
| | TTGTTCCCTC AACTACAACT GGACACTATA ATTTTCTTTC |
| 2002 | GACTATTAAC CAATCATGAA AAACATTTTC AAATAATACT |
| | TAATGACAAG GAAAATGCTC ACAATAATAT GTTAACTATA |
| | AAAGCCTGAT AAAAGTAAGA ATTCAGCATA ATCCCATATT |
| | TTAAGGGAAA TAAGTATATG TACAGAAAAA AGACTGAAAG |
| | ACAACAAAAT GTAAAATTGT TTATGAAGAC TGCCTGTGGT |
| | TTATTTAGGT TATCTTTGTT CTTTCTATCT TTTTATATTT |
| | TCCAGTAAAA ATGAGTTTAT ATTGCTGTAG AATCAGGAAA |
| | CAAAATATTG TGATGCAAAT ATGGCTATGG GACTCTTAAG |
| | AAAAAGGTTT TTATATTGAT TTGAGTATAT AACAGAGTAA |
| | CATAGCACTA AAGTTCAAAG TACAAGGCCA CCATATGAAT |
| | TTGATTAAGT AAAGGAAAAG AATTATTGAA AACAAGGATG |
| | CAAGTAATTA CTTTTTCATT TGGATTGTTT GTTCAAAATG |
| | TTGCTGCCAA GTTATCTCAC R TTATTTCAGC TAAGCTCAGA |
| | GAGACCCCAA CCTCCTGAGT TCAGCATGTC ATTGGCTGTT |
| | CTGTTCCTAC ACATTGCCCT CTTGCATTTT TTCATTTCCC |
| | TGGCTTCAAC TGCCTAGTCC TCCTAACCTT AACTCTTGGG |
| | ATTGACCTGC TGTGTATCTC CTATTTTTCA AAAAAATGCT |
| | TTATGCAAGT TTCTAATACC CACCAAATAC ACTAGTATTG |
| | TACTTCATTC GGTACAGTGC AATCAAACAC AGGTTGAGTA |
| | TTCTTTATCT AAAGTGCTTG GGACTGGAGG TGTTGCAGGT |
| | TTGGGAATTT TTTGGATTTT GGAATATATG CATATACATA |
| | ATGAGATATC TTGGGGATGT GACCCAAGTC TAAACATGAA |
| | ATTCACTTAT GTTTCACATA TACCTTATAC ACATAGCCTG |
| | AAGGTTAATT TTATACAGTA TTTTAATTTA ATAAGATATT |
| | TAAAATAACT TATGCAATAT TTCAAATGCA TGAAACAAAG |
| 2003 | GAGGTGCATT CCTCGAGAGA AGATTGACAG TTGCTTTTGC |
| | AGGTACTGGA TATATTAGCA ATCCAGAATA TCTTTTTTTG |
| | TTTTTGTTTT CTTGTTGTTG TTGTTTTAAA GACAGGGTCT |
| | TGCTCTGTCA TCCAGGCTGG AATGCAGTGG CACAATCATA |
| | GCTCACTGCA ACCATGGATT CCTGAGCTCA AGCAATCCTC |
| | CTGCCTCAGC CTCCTGAGTA GCTGGGACTA GAGCTGCACA |
| | CCACCACACC TAGCTAATTT TTAAAACTTT TTTATAGAGA |
| | TGGGGTTGCC CCGGCTGATC TTGAACTCCT GGGCTCAAGT |
| | GTTTCCCCTG CCTCAGCCTC CCAAAGTGCT GGGATTACAG |
| | GCATGAACCA CCACATCCAG TACAGGATGT CTTTAAATTA |
| | TGTTATCAGT TTGGTGTTTC CAGAATTCTT GGAGAGTAGA |
| | AATTCTGTCC CTAAACTTGT GTGATGGTAA AATACAAATT |
| | CTTAAACATG TTTTTCTCCC V TTTACTCAGA GGCAAAATCA |
| | AGGTAGACAA GTTTCCTTAC TAACTCGTTA AGAAAGGCAG |
| | GATTTTTTTT TTTTTTTAGT ATTACCCAGT GTGTGACTTT |
| | CAGGGTCTAA GCCTTATGTA AAATAAAAAG GTCTACAGTC |
| | AGACTTCCCA CCTTCATTAA TACCTGAGAA ATTAATGAAA |
| | TAGAGAATAC AAATAAAGAA AAATCTATCA AGTGTGGGCA |
| | CTAGATTTTG TCTCCTTTTC TCCTGAACTA AACCACGTAA |
| | ATGGAATCTC CAGGTCCCCA GAGACTGGCA GATATTCCTT |
| | AAGCAAAACC GTTTCAATGT CCTTGCTTAC CTTTCTGAAT |
| | TCATATGTTC CATTATTTGT GGTCTTTAAG GATTTCTCTT |
| | TTACTTTTTG CCAGGCCAGC AATATATTTA ATAATCTGTT |
| | GTTTAAAAAA TATTTACACA ATTATAGGTT TTTTTAAATC |
| | AAAAGTCTCA TTATGATTCC TAAGTCTGCC ATATTGCTAA |
| 2004 | TAAGTTCAAT TATAATATGT ATAGGAATAA GGTACCTCAA |
| | TATGTAAAAA ATCATCAAAT GAACTGGGCA GTGAAAATCA |
| | ACTGGCTTTA ACTGTTCATC ATATTTGAGT CATTTCTCTC |
| | AAACTCAAAC ATACTAAAAC TTCTTCAGCA AATCCATCAG |
| | TATTTGGTTT TCTTTTATAT GCTGATAAAA TCATAGATAA |
| | TCTTACAATT GACATCCTCC AAAAGATTCA AAGCTGATTC |
| | GAACCTTGGA GTTCAGGTTC CTGGCTTCTC TGTCTACTGG |
| | GGGTCAGGAT ACAGGAAGCA CAAGGAGGAG GGGAGAAGAT |
| | TGTGTGGGCA AAGGGGCAGG GAAGGGGCCA CCACTCACCA |
| | CCACTGCAGG ACGAGGCGCT GAGTAAGGGA CGGGGCTGCT |
| | CCCAGCAGAA TCCACAAAGT AGCTCATTCT GCTCTCAGCA |
| | CCTGTGTGAG AGAAGGCGTT GGCTGAGCCT CTGGATGCTC |
| | ACAGGTTTGT GGATTAGAAT M CACAAGGAAG ACACGAACCT |
| | TAGAACTAAA AGTCTCCTTA GGAGCCAACC AGTTCACTTC |
| | TTTGCATGGC AGGGAAAGCA ATGGAAATTC AGAAAGATCA |
| | GTGACTAACC CCCAGCACCG GTAAGAGCAG ACCTCAGACA |
| | GAACCAGTTC CCTGGTTGCA AGGTAACATG GATAACAGAC |
| | CATGTCTACA CACTGCAGAC AGCAAGCAGT AAACCAGTGC |
| | ACAAGAGGCA CATTTTTGTA GGGTTTCTGA GCAGGAACCA |
| | GTTCTTGTGT GTCTCCCCCA CCCACAACCA GGCCTGGCAG |
| | ATAAGTAGGC ATACAATACA CAGTTGGGGT GTAAATTAAT |
| | TGATAAAGGA ATAAACATAG AAAGGATTGG AGAAAGGAAG |
| | GATGGAAAAA GCTCTCCTGA AGAGGTATGT CACCCAGTAA |
| | CCCAAGAAAC AGATAAACAG AGAGAAACCC TGCAAAAGGG |
| | ATTGAGCATT ATTGATCTTG AAAAAAGGAG AAGGGCTATT |
| 2005 | GACCTAGAAG GATGCTTATG AAATGCTAAG TGGAAAAAAA |
| | GTGTGTTGCA ATATGGGTCA TAAGAAATGG TGTCTTTTCT |
| | TTTCTAAAGA GAGAATAGGC TGGGTGCAGT GGCTCACTCC |
| | TGTAATCCCT ACAATTTGGG AGGCCAAAGC AGGAAGATCA |
| | CTTGAGGCCA GGAGTTCGAG ACCAACCTGG GCAACATAGT |
| | GAGACCTCTG TATCCATAAA AAATTTTTAA AAATTAGCCA |
| | GATGTGGTGG CACGTGCCTG TAGTCACAGC TACTCTGAGA |
| | CTGAGGTGGA AGGATCACTT GAACCCAAGG AATTTGAGGC |
| | TGCAGTGAAC CGTGATCACA CCACTGCACT TCAACCTGGG |
| | TGACAGAGCA AGACCGTGTC TCAAAAAAAA GAGAAAGAAA |
| | AAACTATATA TGTGTGTGTA TCTGCAGAAA TCAGGTTAGA |
| | AATACACACA TTACACACAC ACATACATAT GTGTGTGTAT |
| | ATATATATAA TTTATTTAAT R CTAACGTTAT TGGTAGGTTC |
| | TTTAAACATT TTTTGAAACA AATGTGGAAA TTAAAAAATA |
| | ACATGGGCTG GTGGGGAATG TTAATGAGGG GGAGGCTGTG |
| | CACGTGGGGG CAGGGAGAAC ATGGGAACAC TATGTACTTT |
| | CCACTCCATT TTGATGTAAA CCTAAAACTG CTCTAATAAA |
| | TACTAAGTTA TTAAAAGCAA CCGTGAGGCC AGGCGCAGTG |
| | GCTGATGCCT GTAATCCCAG CACTTTGGGA GGCCAAGGCA |
| | GGTGCATCAC TTGAGGTCAG GAGTTCCAGA CCATCCTGGC |
| | CAACATAGTG AAACCCCATC TCTACAAAAA ATACAAAAAT |
| | TAGCTGGACG TGGTGGTACA CGCCTGTAAT CCCAGCTCCT |
| | CGGGAGGCTG AGGCAGGAGA ATCGCTTGAA CCCGGAAGGC |
| | ACAGGTTGCA GTGAGCCGAG ATCGCGCCAC GGCACTCCAG |
| | CCTGGGTGAC AGAGAGACTC CATTTCAAAA CTAACTAGCT |
| 2006 | ACTGCTAGAT CTGACATACA GAGAAGAGCA ATTACAGGGC |
| | TCTTCAAAGA TGCAGGTGCT GCCTTCACAA ACCTATTTTG |
| | CAAGGCATAT ATCAAGGGTA TTAAATATAT TAGCTGGGCG |
| | TGATCAGGCA TGATGGCACA TACCTGTAGT CCCAGCTACT |
| | TGGGAGGCTG AGGCATGAGA ATCGCTTGAA CCCGGGAGAC |
| | AGAGGCTGCA GTGAGCCAAG ATTGCACCAC TGCAATCCAG |
| | CCTGGGTGAC AGAGTGACTC TGTCTCCAAA AAAATAAGTA |
| | AATAAATAAA AAGAAGTTCT TAAGAGAGAA GGAAAATGAT |
| | ATAGGTTTGA AACTCAGATC TACATGAACA ATGGAAGAGC |
| | GTTACAGAGA TAACAGGTGA AGGTAAAACA AAACCCAAAG |
| | GGTATAATGG GTTTCCCTTC CCTTCTCTCT TTCTACGAAT |
| | GCAGTGAAAG GTGAGTTGTA ATCATTTCTA ATGATTTGTG |
| | CACATTCTTA TAAATATTAA M TTAATTCATA CACATGGGTA |
| | AACATATATA TATTCCTAGA TTATTATTGT TTATATGACA |
| | ATTTTTAATT CTAGTGAAAT AAAGATGTTA ATTTTAATCT |
| | ATAAAACTAC AAATTACCTA AAATTATTTT TGTCCCTTTT |
| | CTACATAAAC TTGTTAGAAA AAAATTATGT GCTCTTCATT |
| | TAACAGAAAT TTGAAATCAA GAGAACTGAT AATGCTCTTA |
| | TTTTCCGTAG AAGGTTTTGG ATTGACCAGT TTGCGTCAGG |
| | GAAAATATTT TTGTGCTTTT CACCTTCCTC AAAGCTGACA |
| | GATAGTTAAC TCTCTCCTTT CTTCCTTGGC ATGCAGGTTT |
| | CCTCCATGTT TTAGGTGGGC CTAGAGATGT AAAGTCATGG |
| | CCTTTTTCAA AAGCTACAAG CTGAGCCAAG CATGGTGGCT |
| | CATGGCTGTA ATCCCAGCAC TTTTGGAGGC TGAGGTGAGT |
| | GGAACACCTG AGGTTGGGAG TTCCAGACCA GCCTAGGAAA |
| 2007 | ACAAATGGGG AGGGCCTGTG TCCTCTACAA AGGAGTCCCC |
| | GTAGAGGAAC CCCTTCCACA GGGCACCCCT TCCACAGGGA |
| | GGGGCTGGGC CAGCAGCCGT GCGCAGTGGG ATTCCCGTGT |
| | CTGGGGGCTT CAGTCTTCTC AGGGGACACA CGCCCAAGAG |
| | GCAGGGAGCT TGGGTGGGGG CTGCACAGCT GTGGGCTTCT |
| | GTTCTGGGCT GCTGCTGCCT AGTGCTGCGG CTTCTGAAGT |
| | GTTACCCAGC CTCAGAGTTC AGCCCTCATC TGTAAAGTAG |
| | GTTTAAGAAA ACCGACTCCA GGTGAAGAAA ATGGAGCAAT |
| | ATGCACTGGG CACGGCACCC ATTCCTGTTC CCAGAGACCG |
| | CGGTGGTTCT CACTGTGCGG CATGTGCCTC TCACCTCCCC |
| | TCCCTTCCAA CCACCTTTCG GGTGCTGAGC CGCGTCGAAG |
| | GGACTTTTTG TCTCCTACCT CAGAGGCTCT CCCAAGCCAG |
| | CCCTGGCCCC ACTGTCGGGC W CAGCTCAGCA CGCAGGCGCC |
| | GGGACCTTAC CTGTCTGGCT GCCGACAGTC AGGTTCTGCT |
| | GCAGAAGCAC GTTCTCTATG CAGCAGCCAA TGTTCACGCT |
| | GGGGGTCCGT GCGATCCTCA GCACGCTGAC CACGTCATAC |
| | AAGCCCCGCA TGTTCAAGAA GACGGTGTCA TTCTGCAGAG |
| | CCTGGTCCAG CAGGCTGTTG TCCGTCTTAT TGATCCAGTA |
| | CACGTTGGGC CTGGGGTAGC CGTTTATGGA TGTACACGTG |
| | AAGGTGAGCT CATCCTGGGA GGGGCTGTGG GGGGCGCTGA |
| | CGACGGGCAC GCTGAAGTTT GCTGCAGGGG AGGGAAACAG |
| | ATTGTGAGAG ATGCCAGACC CTGCTGGTCA AGAAACAGAG |
| | GGTACACGGT GCCAAGGCTG GGTCAGAGGG GAGGCGGCCC |
| | ATTGTGCCCC GACATGGGTG ACAGGCCAGG ACCAGGGCTG |
| | TGGTCCGAGC AGCAGGCTCC GCCCTGTCCT GCCCAAGAGT |
| 2008 | CAAAGAAGGT TTTATCTTCT TTTGTGTAAT CCACCAAAGA |
| | GATGTCACTG ACGTTCACCA TTAGCTTGTC CCCTTCTTGC |
| | AAGGAGAACA TGGCTCCGAG GTAGATGGGC TGGAACCAGT |
| | TGCTACCTAC TTCGCATACA GACTTGGTCC CCATGAGGAG |
| | CTGGGTTGGC TCAGGGTAGC TGTCTGTTAC CTTGGTGATG |
| | ACCACAGTGA TGGAGTCTGG CTTGTTTGGT CGGCCTGCTT |
| | GTCTGATTTC ACTGCACTCA GAGGTCATCC CACGGAATGT |
| | GACCTGGGAG TAAATGAAGT AGTCTCCCGA CTCTGGGATC |
| | AGCAGGAATT TGTTGGTATA GTTCATTCGG TTCTTGGTGA |
| | AGGCCAGGCC TAGTTCATGT TCCCAGTGCA GAGCTGGGAA |
| | CTGATTTTTA AAGTGCTGTG TGGGAGTTTG TCTCACAACT |
| | GGAAAGACAA GAAAGAGGAT TAATTTTCTC ATTGGGAAAC |
| | TGTAGACTTT GCTTAAAAAG H GTCTCATATC ATTTTCAAAA |
| | TAGACTAAAG TGATCGAATA TACCTAACAG CTAAAAACTG |
| | CTTTGGGGAG GAATGAATGA AGAATATGTG ACTGGACATA |
| | CACATTTGTT CAAAGAGAAT AACATCTTGG ACTAGTGACC |
| | TGGGGCAAAT TACTTTGCCT TTCTGAGACT GAGTGGTCTG |
| | ACCTGAAAAT TTTTAATTTT ACCTGAGACC TATGATCCTG |
| | GAGAACAATG AAGGTTAAGG AATCCCCCTA TTCTTCTGTG |
| | TTTAGGAAAA TGGCTTGCTG CAAGAATTAT CCTTTCCCAA |
| | ATGACTCAGA TAAAACTCAT CGATGCCTCT CTTGTTTACG |
| | TATGACAAGG CCAGGCACCA GACCCTTCAA ATTCCCATTC |
| | TTTGCCCCAT AAGTGATTGG CTGAACTGTT TTATCCCCAT |
| | TCATCAATTG GAACAAAACA CTTGTCTTAC AGGCATGAGG |
| | TAAGTGATAG AAACTTGGCA TCTCCCTGGT CCTAATCCTC |
| 2009 | GGTCATGGTG GCTCACGCCT GTAATCCCAG CACTTTGGGA |
| | GGCTGAGGAA GGAGGATCAC TTGAGGTGAG GAGCTTGAGA |
| | CCAGCCTGGC CAACATGGTG AAACCCCATC TCTACTAAAA |
| | ATACAAAAAT TAGCCGGGCG TGGTGGTGCA CACCTGTAAT |
| | CCCAGCTACT CGGGAGGGTG AGGCAGGAGA ATTGCTTGAA |
| | CCTGGGAAGT GGTGGTTGCA GTGAGCCGAG ATCTCACCAC |
| | TGCACTCCAG GCTGGGCAAC ACAGCAAGAC TCTGTCTAAA |
| | AAAAAAAAAA AAAAGAAAGA AAAAAAGAGTTATATTATTT |
| | ACGACTCTTT TAGCTTCACT TTCTTATAAG ATTGTTGTGA |
| | GAAGTGAGTA AGACACATGC AAAGTGGTAA ACTGCCTGGC |
| | TGTCATAAAA GTCTTGGCTA CTATCACGGC TGGGAGGCAA |
| | AGGAGATTCA GAGAAGGGCA GAATGACTGC ATAAGGTGAT |
| | CTGCCTGTAA CTCGTGTTTC Y TCCTTTCTAG TATAAAGAGA |
| | TAAAGGACTT CAAGGTCTTA AACTGGTGAG GGAGTATTAC |
| | AGCCTTTGTA TGGAAAGGTT TGACTTTGTG TCTCTGCTTA |
| | AACCCCCATT GTGTTGCCCC TACCAATTAT TGTGCTGCCC |
| | CCTTGTGGTT AACTGTGCTA AGACCTTTCT TTTGCTCTTC |
| | TCCCATTACA TTTCCCACCC TTCCCCACTC CCTTTTAGAC |
| | CCCTCCTCTT AGCTCCCAGT TTCCCAAACT GTGTGCCAAG |
| | GTGCCCAGAG CACCTCAGGC TTGAACTTGT GTTTTGAGTT |
| | GGTTCATGGT TTCAATATTA GATACCTACA CCCGTTTCTA |
| | CAATGTCATG TCTTTGTAAA GATGTATTTT CAGAGGTTGC |
| | TCCGATAAAA AGCAACTACT ACATGAAAAT GAATGTAGAA |
| | CAGGAAATGA CAGTGTGGTA TTGTCCAATT TGATTCTAAG |
| | GTTTGATAAG TTCTACAGTG CTCTACACTA AGTTGTAAGG |
| 20010 | TGAGCAGGTG CAGCCCACGC TGTCAGGAAT GCCCTGAGAG |
| | CCTGGCAACA CTCCCGGGAC TCAAGAAGGC AGGTGGGATA |
| | AGAGCTACAA GAGAGGTGCT AATGGTACCA CTGTTATCAT |
| | CAAAGAGGGT AGAGTAGATT TCCCCTCACT GCGCATCTGG |
| | GACACCTTAC TGGAGGAGGT GGCATTTGAG CTCGTTTTGA |
| | TGAGATAGCA TATATTTTAA TCAAATCATG TGTACCTGAA |
| | TCAGGTAACT TATATTTTGA TATTATGAAT CAGGTAACTT |
| | ATATTTTGAT ATTATGATCC CTCCAGGAAA ATAAAAACTA |
| | GAAGATGGTA ATAGCTCACA TTTATGGAAG GCGACCTATA |
| | CAGCAAGCTT TTCACATCAT GTCCTACGTA TCTCATGAGG |
| | ATGCTGAGAT GCTCAGGGGC TCTGAAACAT ACCCGAGGGT |
| | TCACAGTGAG AGGGTGGCAG AGTTGGAATT TGAATCCTGG |
| | TAGGTTTGTT CCCAAAGAGA M CCTGGCATAT TGGATTATAG |
| | GGGCTATTCC TGCCTGACAG ATCGGACAGG TAGTGGAAGG |
| | AGAAATGCAG CTCAGAGCCC CATTTAGGAG GCTGGTTGAC |
| | TGCATCATAA GACACCCTCT GCTGAGGCTT GAAATGCATT |
| | GTTCAAAACA GTTTACAGCC AATTTTGGTT TGCCTCTGAT |
| | AGAAGGAGCT GAACACAATT TTGATTATTT GCTTTAATTC |
| | AAATCAGGTT AACAAAATCA GTATATTAGT GCAATTTAAG |
| | GACCTTTTTC CCCCTTTATT ACATAAGCTA GTGGACTTCC |
| | CATCTGATGT ATGAAATGTC ACTTTGTCTT TAATTCTTGA |
| | CGTTCACAAA CACTGGTGCT ACTGGAAAAG GAGTGGGAGT |
| | GAGCGTATGT GTGTGTGTGT GTGTGTGTGC ATGTGCATGT |
| | ATGTATATAC ACATATATAT GAGAGTGAAA ACCAAACTGA |
| | GGTTTCAGAT GGACTTTAGA AGGATTGAGC AGGTTTTGAA |
| 20011 | AAAGATCTCC AGATTGCTTG TCCCGCAAAT TCCTAGCATC |
| | CTCCTGTACT ATTGGATGGA CTGTTAGGAA GTTGACTTGT |
| | ATTACAAATG CATACTGATA ATTTTTTTTT AAAGTTGAAA |
| | TGTTGATGTG ACTACCTGAA AAGAGATCTT TGGCTGGGTA |
| | CAGTGGCTCA TGCCTGTAGT CCCAGCACTT TGTGGGGTCA |
| | AGGCAGGCAG ATCACTTGAG GTCAGGAGTT CGAGACCAGC |
| | CTGGCCAACA TGGTGAAACC CTGTCTCTAC CTAAAATATT |
| | TTTAAAAATT AGCTGAGTGT TATGGTGCAC ATCTGTAATC |
| | CCAGCTACTC AGGAGGCTGA GGCAGGAGAA TCCCTTGAAC |
| | CCAGGAGGGG GAGGCTGCAG TAAGCCGAGA TCGTGCCACA |
| | GTTGCACTCC AGCCTGGGTG ACAGAGCAAG ACTACATCTC |
| | AAAAAAAAAA GAGAGAGAGA TCTTGGGAAT CAGATAGGTG |
| | CAATTCCTAC CACCATTAAA K TCAGAGTAAA ACTGAAGTAT |
| | ATTTATTAGT CATTTCTACC TCTTATATAC AAATATGTCT |
| | GGCAGTTGTG ACTTGATTTT GTTTCTTTTC TCCTAAGAAA |
| | CTCTTTTACT CACTCGCTAG TATCATTAAG AGGTATGAAT |
| | CAACATCGAA ATTACCAGAC TTTTAAAATA GCCCTCTTTT |
| | TTTAAAAAAA AGTTGACGTT CTATTTTTGT TTAAATATCC |
| | CTTTTGATGT GCTAACTAGG TTAGTCTATC ACCTTTAATG |
| | AAAACTTGAA TTTCTAAAGG TGCATTTCTA AAGCCAAGAA |
| | AACAAGTAGG TTATGACAAA CAAACAAACA GTGGAAGTGA |
| | TGCTATGCAT CAACTGTTCT CCAGAGAAGT ATCAATAAAT |
| | TGCTTGTAGT TATACAAATG CAGATGCATA CATTAGAGAT |
| | TTCCAAAATA CAAAATAATT AAGCTTGATG AAGACTGATA |
| | TTATATATGG CAAAGGGAAA TATTTAGGCA GTGTCATCTT |
| 20012 | TTCTTTCTTATTTATTTGTACATTATCTGTTTGTATCCTTGAATT |
| | TTCTCTGGGATGTTATAAAAGAAAAATATTACAAGCATAATTTCT |
| | GACACAATGTTTTATAACTGTTTTCAAAAGCAATCTATTTCTCTC |
| | TTAATTTCTATAGAACCCATTTTAGTCATTCCTATGATGAATGA |
| | AAAAAAACTCACAATTAGTIGTCAGTTTCAGAAAGGAGTCTCA |
| | GAAGCATCTTAGAACCACCTAGGCGGTCTTATAGGCGTCACAG |
| | AAAAATATTCCACCTTACTTATTCTTATCTTCTTCAAACTGACTC |
| | CAAATATAATAAGCAGGCTTAAGTTATATAAGGTTCCTTAAAA |
| | GTTGTTCTCAAAAACAATTAAATGCAGACTGTCCTCAGTAAAAC |
| | TTGCATTGGCCCAGTCCATTTTACCAAGTTTGCTCCTTCTTACAT |
| | GTACGACTGCCCCTGTGACAAGTTTAAGCCTACGTTAATTAATC |
| | ATCTTTCCATAACANGAGACATATTCATCCAACCCTGAGAGGG |
| | ATAAGGGGTAACAGGCAAGATATATTCAAATTGTGACATTTAA |
| | GGTCAACTTGACTTTAAAACTCATATACTGCTCAGTTTTCATAT |
| | ACGTGGCTGAAAACAAGTCATCACAGAGAACTGGTCACACTGT |
| | TAGAGGACCAAAATAGTAAAATATGAACAATTCTTCCATATTTA |
| | ATGATATTAAATATAACAGGTCCTATGTCTATGCAATTGAAGTC |
| | AACATGTCACTAATTAGGGCTTCCTTTGTTATCAAACTTGCTGA |
| | GAAGATAGAACAGTGAGGAAAAAATAGCAGGAATTGAGCTGT |
| | ACAGAATTAAAGACATTCTTATGAACCTTAAGACTTAAGGTCA |
| | GTCACACTCATATGACATTTGGACTATTAGACAACTCTTCTGAC |
| | CTCAAATTTTGCTCTTACCAGTTGGTGATAATCCTTTGGTAAGA |
| | GAGCATGTTAAAAGTAACCAAATCAGATAAGGACTA |
| 20013 | TTCTGAGCAC TCACATTTTA ATGCTGGGAA TTTTATGCTG |
| | AGGTTCAGTG CTTTTCAGGG AGCCATGAAC CCCCTGCAAT |
| | GACTTGCAGA CTGTAGGTAT TACATGTAAA ACTTGTGTGA |
| | GTAATTTCCT GAAGAAGGGG TTTCATTCTT CAGATCCTCA |
| | AAAAGATCTA TGATCCGGCC AGGCGCGGTG GCTCATGCCT |
| | GTAATCCCAG CACTTTGGGA GACCAAGGCG GGCATATCAG |
| | GAGGTCAGGA GATCAATACC ATCCTCGCTA ACACAGTGAA |
| | ATCCCATCTC TACTAAAAAT ACAAAAAATT AGCTGGGTGT |
| | GGTGGCGCAT GCCTGTAATC CCAGCTACTC GAGAGGCCGA |
| | GGCAGGACAA CAGCTTGAAC CCAGGAGGCG GAGGTTGCAG |
| | TGAGCCAACA GAGTGAAACT CTGTCTCAAA AAAAAAAAAA |
| | ATATATATAT ATATATATGA TCCTAAAAAG ACATTGATAT |
| | TAAAGAGTAA TGATGGGGAA R GACCACCAAG TGATCATTTA |
| | TAAGATGCTG CGAGAATTGC TAAAGTTGAG GGATGGATTC |
| | TGCATTCCAG GAGAACAAAG GAGGTAGATC CCGATTAACT |
| | GAGTAGCAGG ATATTGAGGG AAGCTTCTTG TAATGATTCA |
| | GCTGAGTCTT ACACAATGAA TGAGACTTGG ATAGATGAAC |
| | ATGCATTAGG AGACATCAGT TCTGGTCAGA GGAAACAGCA |
| | AATGCAAAGG CCCAGAGCCA TAAGAGATTC AGATGCACTA |
| | AAGAAATATC CCATCATTTA GGATGGTCGG CATATACACA |
| | GAGGGCCTAT AAGGAAGGAG AAGAAACTGA GGTTGTAGAA |
| | GCTGGTAGGG ACTGCATGCT GAAAGGCATT GTAAATCTTA |
| | GACTAAAATC TGTGGGAGAC TTTGAACAAC CTAAAGATTT |
| | TAAGCAGAGT GATGCAATGC ATTTGTCTTT TGAATGCAAA |
| | TATTGCTGGG GCGGGTCTTT TGTGTTATCA GCTAATGATT |
| 20014 | TGTAAACTTA TTAGTGCCTC TGCACACCAT ATAATTAAGA |
| | TCAAATTCTC CAAGGGTTTA AAATAGGGAC TGCTGCTATT |
| | GTGCTGCTGA CAGCGCTAAG GAACAGATAT TTGCCTTTTT |
| | TACATAGACG GCTCTGCCCC GCTTTTGCTG AAATTCCCAC |
| | TCTCACAGGG CTGGGAGCCC AGCAGGGTTT ACCTGGACCA |
| | ATGAGGGGGG CTCACTCTGC TGGGAAATTT GCTTTTATAG |
| | ATGGCACCAC CAACGCTGAA AACATGGAAG TGGAGGCAAA |
| | CATTCCAGAG CATCTACTGT CGCATCCCCT AGAAGGGGAC |
| | TGTGGTCAAG GCAGATCAGT AGACAGAAGG CTGGAAGGGA |
| | AATGAGCCCC AAGGAAGAGG CTCAGATCCA GAGCCTGTGT |
| | CTTGGTGAGA CTCCAACAGA AGTGCCTCGA GGCTGGTGCT |
| | TCAGAAGGAA GTGGGTGTAC AGCTGTGTAA GTGATCTGGG |
| | TCATGAATAA ACAAATGAAC M CAGGAATGCA TGCACCATGA |
| | GAGCCTGGAG GGGACTATAA GACAGACAAC GGGTGATCTG |
| | GGCACAGGTA TCAACTGCTG AACGCCCAGT GTGTGCGTGG |
| | AGGAGGAAGG GGGTCAGAAA GGCAAGGAGG ATGTACCAGT |
| | ATGGTAGAGA CGAGCAACTG TGGGCAAGGG GTGCTCAGGA |
| | TGCATGGGGG TGTGGAGAGA AGGGGAGAGC AAGAAAGGCT |
| | TCCAGGGGTG AGGAGCCAAG GAGGTCCTGA AGACAGCTAG |
| | GAGTTAGCAG GCAGAGGAAG GGGATGGGCA TCCCAGGGAG |
| | AAGGAACGGC AAGAACAAAG CAGCACAGCC GTGGAGAGCC |
| | TGTCAGTGAG CGGAGAGCCC GTCAGTGAGC AGCTCGCCTG |
| | GGTTCCAGGG AACAGGGCCA GAATTTTTGG CAGGATAGAC |
| | TCAAAGGCCT GAGGTGAACC TGCAAACAAA GGTAAAAACA |
| | CTAACTGGTT TTAAGCAGGA GAGAAATATG ATCAGATTT |
| 20015 | TCACTGCAAC CTCCACCTCC CAGGTTCAAG CGATTCTCCT |
| | GCCTCGGCCT CCCGAGTAGC TGGGATTACT GGCATGCACA |
| | TCATGCCTGG CAAATTTTTG TATTTTTAGT AAAGACAGGG |
| | TTTCACTATG TTAGCTAGGC TGGTCTTGAA CTTCTGACCT |
| | CAAGTGAACC GCCCACCTCG GCCTCCCAAA GTGCTGGGAT |
| | TACAGGCATG AGCCACCGTG CCTGGCCAGG GGATGATCTC |
| | TTTCTAGAAA TTCATATCCT TCAATTCTGG AAATGTTTCT |
| | CATGATAGTT CTTTGATAAC TGACCCTCCT TCCTTCACTG |
| | TATTTCTCTT TCTGGGACTT TTACTAGTCA GTGTATTTCT |
| | GGGTTGGTCT CTCTCTTTTC TCTTTTATTG GCAACCCTGA |
| | TCTAAGGAAC TAAGGTATAG AGGTGGTTGA GTCCTGACCA |
| | GAGCCGTGAG GGTCTAGATT TATGTAAATG ATGGAGCCAT |
| | ACACGTTACT TTATTTATAG Y AAGATATTGT AAAGATTTTG |
| | AAATGTCATT TATATGAAAT GTCAAGATTA TTAAATTCGT |
| | AGTTCACTGT AACCTCAAAC TCCTGGGCTC AAGCAATCCT |
| | CCCACCTCAG CCTCCAAAGT AGCTGGGACT ACAGGCACAT |
| | CCCACCATGC CCAGCTAATT TTTGTATTTT TTGTAGAGAC |
| | GGGGTTTCAC CATGTTGCCT AGCCTTGTCT CGAACTCCTG |
| | GACTCAAGCA ATCCTCCTGC CTTGACCTCC CAAAGTGTGG |
| | GGATTACAGG CACTGAGCCA CTGCACCTGG TCAATGCATT |
| | TTTAAATATG GTCTAAGGGT ATCAGCAAGT TGCAGATTTG |
| | ATAACAGCTG GGTCTTTTCA TTTAGTAACC ACCCTTTTTT |
| | CCTCCTCTGT ACTCTCACAC AATATTAAAA TACCTCCTAT |
| | TAAATCTCTA TTATCCTCTT CTCTTCCTGT TGCATTTTTC |
| | TCCCACAACT TAAGGCTCAA GTCTAAGCAG TGAAAACATA |
| 20016 | ATAAATTAAA ATAACAGATA ACATGGGCTG TTTTTGACAG |
| | GAATATATTT TAGCTTCTGA TAATTAGCTT TAGTAATCAT |
| | TAGCTTAGTT AATGAAAAAT AAAATACTTA TAATATTAAA |
| | AATATGAGAA GCTAAACTAT GAGCAACTAA CAAATCAAAA |
| | CCACGTTCTT CTGAATTCCT GACTCCCCCG CAAATAGTTC |
| | CAAATCACTA TAGTATTCAC ATAGCCCTAT AATAACCTTT |
| | GTGGATAAAC AGTGAATTCC ATGTTCAATG TAAAATAACA |
| | CAGAAATTTA GAGTTTTAAT TGCAATGTCC TATGTAAACT |
| | TTAAAAGTTT CCAAAGCAAT TTTCATAAAT GGGATTCCAT |
| | TTTCCACAGC CAAAATACTA TACTGACACT GACCCTCATG |
| | AACTGTTACC TATGCATTTG TGTGCCATTT ACTTTTAATT |
| | ACAAAATTTC TCCCCTTGAT TAAATTTATT GTATGCCTTG |
| | CAATATATCA AAATGATAGA W TAAATGTATA AATAAATTAT |
| | TATTTATAAC AAAATTGAAG CTTGTCCTTG GAATCATTTT |
| | CTTGTAGTTC CATGTAGCTA AAATGGGGCT TTGATTTCAA |
| | CCTTGCCCCT GATGAGCTGT GTGATGAAAT CTTAGGCAAG |
| | TTACTCAACC TAAGCCTCAG TTTCCTCATC TGCAAATCAG |
| | GGAAAATAAT ACATGCTTTA GACTATTATT TTGAGAATTA |
| | AATGAAATCA TGTATACAAA TTGTCAAACA GGGCACAGCA |
| | TACTCAGTAC CTTATCATTG TTTAGTGTTG TTATTTTGTA |
| | TCTACAGTGT TTTTGGAAAA TAGCATGATT AATCAATTGA |
| | CTGGAAGACA CACAGTCTAA CAGACAATAT ATAGACCATT |
| | TATATTGGCC ATGAAAGTGT CCATAATGGC TGACTTAACT |
| | GGCTTTAATG TGTAAAATAT GGTGACTCCC ATGGTTTTTA |
| | AGATATGGCT TAAAGTAGAT ATCAATTTCT TTACATTGGT |
| 20017 | GACCTAGAAG GATGCTTATG AAATGCTAAG TGGAAAAAAA |
| | GTGTGTTGCA ATATGGGTCA TAAGAAATGG TGTCTTTTCT |
| | TTTCTAAAGA GAGAATAGGC TGGGTGCAGT GGCTCACTCC |
| | TGTAATCCCT ACAATTTGGG AGGCCAAAGC AGGAAGATCA |
| | CTTGAGGCCA GGAGTTCGAG ACCAACCTGG GCAACATAGT |
| | GAGACCTCTG TATCCATAAA AAATTTTTAA AAATTAGCCA |
| | GATGTGGTGG CACGTGCCTG TAGTCACAGC TACTCTGAGA |
| | CTGAGGTGGA AGGATCACTT GAACCCAAGG AATTTGAGGC |
| | TGCAGTGAAC CGTGATCACA CCACTGCACT TCAACCTGGG |
| | TGACAGAGCA AGACCGTGTC TCAAAAAAAA GAGAAAGAAA |
| | AAACTATATA TGTGTGTGTA TCTGCAGAAA TCAGGTTAGA |
| | AATACACACA TTACACACAC ACATACATAT GTGTGTGTAT |
| | ATATATATAA TTTATTTAAT R CTAACGTTAT TGGTAGGTTC |
| | TTTAAACATT TTTTGAAACA AATGTGGAAA TTAAAAAATA |
| | ACATGGGCTG GTGGGGAATG TTAATGAGGG GGAGGCTGTG |
| | CACGTGGGGG CAGGGAGAAC ATGGGAACAC TATGTACTTT |
| | CCACTCCATT TTGATGTAAA CCTAAAACTG CTCTAATAAA |
| | TACTAAGTTA TTAAAAGCAA CCGTGAGGCC AGGCGCAGTG |
| | GCTGATGCCT GTAATCCCAG CACTTTGGGA GGCCAAGGCA |
| | GGTGCATCAC TTGAGGTCAG GAGTTCCAGA CCATCCTGGC |
| | CAACATAGTG AAACCCCATC TCTACAAAAA ATACAAAAAT |
| | TAGCTGGACG TGGTGGTACA CGCCTGTAAT CCCAGCTCCT |
| | CGGGAGGCTG AGGCAGGAGA ATCGCTTGAA CCCGGAAGGC |
| | ACAGGTTGCA GTGAGCCGAG ATCGCGCCAC GGCACTCCAG |
| | CCTGGGTGAC AGAGAGACTC CATTTCAAAA CTAACTAGCT |
| 20018 | ACTGCTAGAT CTGACATACA GAGAAGAGCA ATTACAGGGC |
| | TCTTCAAAGA TGCAGGTGCT GCCTTCACAA ACCTATTTTG |
| | CAAGGCATAT ATCAAGGGTA TTAAATATAT TAGCTGGGCG |
| | TGATCAGGCA TGATGGCACA TACCTGTAGT CCCAGCTACT |
| | TGGGAGGCTG AGGCATGAGA ATCGCTTGAA CCCGGGAGAC |
| | AGAGGCTGCA GTGAGCCAAG ATTGCACCAC TGCAATCCAG |
| | CCTGGGTGAC AGAGTGACTC TGTCTCCAAA AAAATAAGTA |
| | AATAAATAAA AAGAAGTTCT TAAGAGAGAA GGAAAATGAT |
| | ATAGGTTTGA AACTCAGATC TACATGAACA ATGGAAGAGC |
| | GTTACAGAGA TAACAGGTGA AGGTAAAACA AAACCCAAAG |
| | GGTATAATGG GTTTCCCTTC CCTTCTCTCT TTCTACGAAT |
| | GCAGTGAAAG GTGAGTTGTA ATCATTTCTA ATGATTTGTG |
| | CACATTCTTA TAAATATTAA M TTAATTCATA CACATGGGTA |
| | AACATATATA TATTCCTAGA TTATTATTGT TTATATGACA |
| | ATTTTTAATT CTAGTGAAAT AAAGATGTTA ATTTTAATCT |
| | ATAAAACTAC AAATTACCTA AAATTATTTT TGTCCCTTTT |
| | CTACATAAAC TTGTTAGAAA AAAATTATGT GCTCTTCATT |
| | TAACAGAAAT TTGAAATCAA GAGAACTGAT AATGCTCTTA |
| | TTTTCCGTAG AAGGTTTTGG ATTGACCAGT TTGCGTCAGG |
| | GAAAATATTT TTGTGCTTTT CACCTTCCTC AAAGCTGACA |
| | GATAGTTAAC TCTCTCCTTT CTTCCTTGGC ATGCAGGTTT |
| | CCTCCATGTT TTAGGTGGGC CTAGAGATGT AAAGTCATGG |
| | CCTTTTTCAA AAGCTACAAG CTGAGCCAAG CATGGTGGCT |
| | CATGGCTGTA ATCCCAGCAC TTTTGGAGGC TGAGGTGAGT |
| | GGAACACCTG AGGTTGGGAG TTCCAGACCA GCCTAGGAAA |
| 20019 | GGCAATTCCA GTGAAATAAT TGTTTGTTTG TTTGTTGAGA |
| | CAGGGTCTCC TTCTGTCGTC CAGGCTGGAG TTCAGTGGTA |
| | TGATCTTGGC CCACTGCAAC CTCCACCTCC TGGGCTCAAG |
| | CCATCCTCCC ACCTCAGCCT CCCGAGTAGC CGGGACTACA |
| | GGTGCACACC ACCACGCCCG GCTAATTTTT GTATTTTTTG |
| | TAGAGGCGGG GTTTCCCAGC GTTGCCCAGG CTGGTCTTGA |
| | ACCCCTGAGC TCAAGTGATC TGCCCACCTT GGCCTCCCAA |
| | AGTGCTGGGA TTACAGGTGT GAGCCACCGC GCCCGGCCTG |
| | AAACAATCGT TTCTAAATAT TGGTGTGGGC CACACAGTCA |
| | TGTTTGGACC TACTTGTGGC CTTTTACAGA CCCCAGGCCA |
| | AGGCTTTGGG AACTTGGCTG TCAGCCTCCT GTGCCTTCTG |
| | CACCCCCACC CCATTTCTGC TTTCTGGAAC CCCCGATCCT |
| | GTCCTGTTCT GTGGTGATTC R GGTGTGCTTG GGCTCTAGGA |
| | GAAGATGTGT GAAGAATCGG CATCCTTTGA CCTGACTCCC |
| | CATGACCTGG CTTCAGGACT GGACGTCATA GACCAGGTGC |
| | TGGAGGAGCA GACCAAGGCA GCGCAGCAGG GTGAGCCCCA |
| | CCCGGAGTTC AGCGCGGACT CCCCCAGCCC AGGTGCGTTC |
| | ATAGCCAGAC TGCTTGGTCC TGAGGCCTGC GCTGCTGCAG |
| | GGTGAGCCCC ACCCGGAGTT CAGCACGGAC TCCCCCAGCC |
| | CAGGTGCGTT CATAGCCAGG CTGCTTGGTC CTGAGGCCCG |
| | TGCTACTGCA GTGGGCAGCC TGCCCTGTGG CTGTGTGTGG |
| | TCGGCCTGGG CACCATCTAT TCAGGCTGGC ACTGCAGGGC |
| | ATCCGCTTCT CTCAGAGGCT TCTTGGGTGT GAATTCTTCA |
| | GGGTCCTGTA GCCTGTGGAA GGGCTGGTAT TGTTCAGTAG |
| | TTCTGGTATT TTCCAAAGAC CTATGTCTTC TCCCAGCCAG |
| 20020 | GTTGGTGGAT TTGGCCTGCA CGGATTCTGT GTGGCCTCTT |
| | CCTTCCCCTG TTGGTGGATT TGGCCTGCAC GGATTCTGTG |
| | TGGCCTCTTC CTTCCCCTGT TGGTGGATTT GGCCTGCACG |
| | GATTCTGTGT GGCCTCTTCC TTCCCCTGTT GGTGGATTTG |
| | GCCTGCACGG ATTCTGTGTG GCCTCTTCCT TCCCCTGTTG |
| | GTGGATTTGG CCTGCACGGA TTCTGTGTGG CCTCTTCCTT |
| | CCCCTGTTGG TGGATTTGGC CTGCACGGAT TCTGTGTGGC |
| | CTCTTCCTTC CCATGTTGGT GGATTTGGCC TGCATGGATT |
| | CTGTGTGGCC TCTTCCTTTC CATGTTGGTG TCCTTTTTTC |
| | CATGCCAGGA ATCCTGGTTC TCAAGGGCGG GGTTGTTGGC |
| | ACGAGCGTGA TGCAGACTGC CTTTGCTGCC TTTCTCTTGC |
| | CCAGGGCTGA ACATGGAGCT GGAAGACATT GCAAAGCTGA |
| | AGAGTAAGTG TTGCCCTCCC Y GCCTCCTTGC AGCTGGGTGG |
| | GGCCTCCTCC TTGCGAGGAG GTGGGTGACA CCTCCTCGAC |
| | CCACAGTGAT CCTGCTGCGC CTGGAGGGGG CCATCGATGC |
| | TGTTGAGCTG CCTGGAGACG ACAGCGGTGT CACCAAGCCA |
| | GGGAGGTGAG AGGCGGGGAG CCAGCCCCTT CACTGCAGGC |
| | CCAGCCTAGA GCTAGAAACG GGCCATGGTG CAGTCCTGGG |
| | CTGTCACATC ACGAGTGAGG CCTGTTTTCA GGCCTGTTTT |
| | CCCTTTTTGA GACCTGGGAG GAGCACCTGC TTTGCATGAT |
| | CTGGTTGCTG AGATGTTGAG AGGAGCAGCA CACACTCCCA |
| | CGGGACAGCA CACAGCCCCC CACGGAACGG CACACACACC |
| | CATGGAACAG CACACACACT CCCACGAACA GCACACACAC |
| | TCCCACGAAC AGCACACACA CTCCCACGGA ACAGCACACA |
| | CACCCACGGA ACGGCACACA CACCCACGGA ACAGCACACA |
| 20021 | AAAAAAAATC CACATCCTAA CTCCTGGAAC CTATGAATAT |
| | GTTAGATTAC ATGGCAAAAA GGACTTAAGG CTGTGGATGG |
| | CATTAAGGTT GCTAATTAGT TGCCCTTAAA GTAGGGAGAC |
| | TATCCTGGAC TGTGGAAGTG AGCCCTGGAT TATGAATGTG |
| | ATAGGGAAGC AGAAGCATAG AGAAACTATG TTACCAGGTT |
| | TGAAGGTGCA GGAAGGAGCT ATTAACCAAG GAATATGGGC |
| | AGCTCTAGAA GCTGGAAAAG CAATGGAATA ATTCCTTCCT |
| | AGAGCCTCCA GAAAGGCACA CAGCCCTGCC ACACCTTGAT |
| | CTTAGACCAA GGAAACCTGT GTCAGACTTC TATCCTACAA |
| | AACTGTAAGA TAGAATTGCG GGTTGTTTAG GGTGCTATTT |
| | AGGGTAACTT GTGACAGCAG CAACAGAAAA GTAATGCACT |
| | TTCTCAACTT TCCTCTCTCC CTTCTCCCCC AGAACCAAAC |
| | ACTGCTGGCT CTGGGCTCTC R CAGAACACTG TCCTTACAGT |
| | ATTTAATGCT CTTGATACTA TCTGGGGCCT GGCCACGTGC |
| | ATCCCATCCT TCCCTTAGCT TCTCCAGGAG CATTGTGGCT |
| | TGGTGTCACG ACCTATCTGA AAGCCTTAAC CCTGCCACCA |
| | CCCACTTTCT GCTGGAAGGA CAGGCACTGT GAAGTGAAAG |
| | GACCCACAGC CCATGAACTG GAAGGAACAG GAAGGGCAGG |
| | AGAAAGAAGA AATAAGAGGA GAGCAGCAGG GGGATGCAGG |
| | GAGGAGGAGG ATAAAGGGGT TACCAGAGGA GAGGAGGTGA |
| | GAAAACAGAG GGAAGGAATG AAGGAGGAAG ACAGGGTCAA |
| | AGAAGAGGAG AAGGAAGGAA GGGCGCTGGA GGAGGACACA |
| | GAAGCTAGGG TGGCAACGAA GAGGAGAAGG GAGAATGAAG |
| | AGAAAGGACC TTGTTCTGCC CCCACCCATC TCCCACCTGA |
| | ACACCCTCTC CTCCCTCCTC CCTGAGATCT CCCCCAGCCT |
| 20022 | AGGAAATTTC ATAGAAAAGG AAGGGAAACA GTGACACTCT |
| | CCAGTTTTGG CCTGAGCATA TAAAATTATT TGCCTCTGAA |
| | GCCCTGAGAT CCTAGGCCAA AATAAAACAA AACAAATAAA |
| | ATTAAACATC ACGATAACTT CAAAGCCTTC GTTTCTACAT |
| | AAGCAGGAAC TGAGGAGGAA ACTGAAGCAT TGGGCTGCCT |
| | AGGTATATGA TCATTGCAAT GTCTCTAGGT GGATGGATGA |
| | GTGCCTGGGG AGCAGCATAG ACTGATCTCT TGCTTCTACT |
| | TCTAAATCAT GGACTTCCCC TATCATCTAC CTAACAATGT |
| | TGGACCCTGC AATTTCAACC TGTGAATTTT GTGATACTTA |
| | TTATATGCAG TTTTCAAGCT CTCTTTAGTT TGCTTTTTCT |
| | TAGGTGGAGA AAAGACTCAT TCAAGTTGAT GTTGATAGTG |
| | GATATCACCC CATCAGATAC TATGATCATA AGATTAGAGC |
| | TTGGAGAGCC CCAAAGAGTA Y CTGGTCTTCT TTTTCAAGCT |
| | GAGGATACAG AAAGCCCAGA AAAAAACATG ATTTGCTGAA |
| | GGTTACCTAC ATAGTGAGTA AATGCATGAG AATGAGAAGC |
| | CAGGTATTTT GCTTTCTGTG ATCACTCTTA TCAGAGGAAA |
| | TTCTTATGGT TGCACTTATG ACAGCTGCAT TAAGAGTCTG |
| | TACAATGGAA AGCTTTGGAG GAGCTGTTAA ACATATGGAG |
| | TCTAAGGAAA TGAGAGTCAG AGAGACGGCT TCAACTTATC |
| | CCTTATCTAT AACTTGGCAG TAGAGCTTTC AAGAGCTCCA |
| | ACCGCCAAAG CTATGGTTTG CTTTCTGAAT TGCTGAAACC |
| | ACAGTGAAAA AGGAGAAATA ACAGGAGTGT ACAGATTTTT |
| | CTGTGTTCTT TGGCTTTCAC ATTTATCTGG TCCAATAAAT |
| | TCAACAGGTA TTTCACTGCA AGTTGAAGTT GAATGATAAT |
| | GTACAACTAT GAGGTATATT TTCTCAGCCA TTTCTCTGAA |
| 20023 | CTCCACTGTA GCTCAAGTGT CAATGCTTAA TACTGCTTGA |
| | TTTTCCTGAA TGATTTCTCT ATCCCCCAAA GTAAAATGTG |
| | TAATTTCCCT TTTTCCGACT CCAATGTTCC TGCACTTACT |
| | GCCAACATAC CACTTTAAAA TACTCTAACA TCTGATTTTT |
| | TTATTTCCCA TTACATATCT ATTACATATC TCTTGAAGAC |
| | AAGAAATCAT TTGTATTTTT ATATCTTGTT TTCAATATTT |
| | AAATGACACA TGCTATTTCC ATTCCCAAAT TAATTGATAA |
| | ATACATGAAT AAATAAAATA GCTGTGCCAT ATAGTTATCC |
| | TTGATATCAC TCTAGATGAG GAAACTGAGG CTGGAAAGAT |
| | TAAACAGCTT AAGTAATATT AACAAAGCAA ATAACTCTTG |
| | GGACCTCCTT GCTCTGTGTA TGTCAAAGCT CATGCTCTCT |
| | TTCAACTCCA TTACATCTCT TTGAATCAGA TAGTAAGATG |
| | AAACCTCTTC TAGGAAGTAA R GACTTCCTGG CCCCAATCAA |
| | TTCTTTTTAC TTGCCACCTG CTTGTGAATA TTAATATTGC |
| | TTTCGCTGGA TTTTAAAAAG TAGACTCCTA GGTAAACAGC |
| | AAACAAGAGA GGCAGAGGCC AGAATGCTCA GAAAAAAGGA |
| | TACAAACTGG CGCAATAAGG ATTATATGGT CTGAAGCAGA |
| | GGTATGTGGA AGCTGAGGTG GGAAAGTGAT GGTAAAGCAA |
| | ACCAGACCCA AGGATATTGG TTTATCTTAT GGCAATACTT |
| | AACCCATGGA ATGAGAACAT TTGTATGAAT TATCCATGCC |
| | ATTGTTTTCC TCCATATAAG ATATCATATT TCCCATACGT |
| | GGTTTGGAGA GACTTCCTGG AGTAGATCGA TTCCAAGTGT |
| | ATCTTGAATG GTAGGGAAAA TATGGCTTAG TGTTTGGAAA |
| | AAGGGATCTA ATTTGCAGAC TTCAAGGCCA GTGAGATTGA |
| | AGGAGCTGAT TCAAATAAAA AATAGGCATA CTTGAAGCAA |
| 20024 | TTAGCTTCTG CTTGAGCATT TCTACTCACT GGAGTTCATT |
| | ACTTTCTGAA ACTGTTTCCT GTTGAACAGC TTTAATGGTT |
| | AGAAATTTCT TTGTTATACT GATCCCAGGC ATGCATCACG |
| | GTGATTTCTA ATAATTGACA AAATTATTCC CCAGTTTTCT |
| | TAATCTCTTC TCTACCTGAC CTGGTTCATA GTAATATATT |
| | TATATTCCTC AATATGCATT CTACTATAGC AATATTTATT |
| | TTTTCATTCT CATTGGAGAA TTGTGGATAA TGTATTGACT |
| | TCAGAAAATA TACATGTGTA ATCAGTATAC AGGTAGACTA |
| | CTGTGAGGGC CACCTTAGAG GGCTGTTTTT GGAAGCTCAG |
| | GATCCAATAA ATCTAACACC CAAGACCCAT GATTAGCTCT |
| | TCATGGGTAG TTGAGGTCTT TCAGGGGGGT TTATTTTTGG |
| | TTAGTTACCT ATCTTAATCT TTTTGGTTCA TATCTCTTAT |
| | GGGGAGAGAG GTAGGGAGGG R CATGGAAAAT ATCCTATCAA |
| | ACCTCCATTT ATAATTGTGC TCACTATCTT ATAAATAAGA |
| | CAAGTAAATT TTTCTAAAAC TTCGGAAGTT TTCTTGATAA |
| | TTATATAGTC ATTTAAGGAT TAATGAATTC TCTAAAGTTT |
| | AGCCAGTTAT CCATATTAAT GGTAGCTAAA AATTGAGAAT |
| | GCCACAAAAA TTTCAGACAT CTGACTTTTT AAAAATTAGA |
| | ATTTTTTGGC AGGGTGTGGT GGCCTGTAAT CCCAGCACCT |
| | TGGGAGGCCG AGGCAGGCAG ATCACTTGAA GTCAGGAGTT |
| | CCAGACCAGC CTGGCCAACA TGGTGAAACT TTGCTCTACT |
| | AAAAAATACA AAAATTAGCT GGGCCTGATG GTGCACACTT |
| | ATAATCCCAG CTACTTGGGA GGCTGAGGCA GGAGAATTGC |
| | TTCAATTTGG GAGGCAGAGG TTGCAGTGAG CCAAGATGGT |
| | GCTACTGCAC TCCAGCCTGG GTGACTTGTG ACTGGGCAAC |
| 20025 | TTTTCCATCAGGCTCAGAAAGCAGAGTGACATAAAAGCTGGGT |
| | ATGTGCTAAGGAGGAGGGGGAGGGAAAGTCTCCAAATAAATCA |
| | TTTAACTCACAGAGTTTAAGACTGGAAGATTCTCCTGGGCCTTG |
| | TAAGCTATAAAAAAAAGCAGATCTCTGTCAAGAGGCCTTTTCTC |
| | TAAAGCAGTTCTGACTCAGCCTATTTGCCCTTGGAA |
| | GATGCTGCAGCACCTAAGACATCCACAGGCCATCAGTCAACAC |
| | GTGATCTCCTCTCTAGCTATGCTCCCTCTAGAAATGCAGGATCT |
| | TTTGCCCCATCCTAAACTCAGAAAAGGGGTTTCATGTGCAGAAC |
| | ATGGTGGAGAATCCTAGGTCTCTGACTCACAAAAGGATCACCTT |
| | GGGCCTGAGCTTCCTCATCTATGAAATGGGGATGG |
| | GAATTCATGCCTTGCTGTATAATTGCAAGGATTCTATGGAGTAA |
| | TAAAGGTAAGCGTCTGGCATGGTTTCTGTACATCTCSGGTGCTC |
| | CTGGTACTGGCTGTCACACAGGTCAATAAATATCATTTCCTCCT |
| | AATCTTTCCACATGCATAGTTATTGGAAAGCTGGGTGGGCAGCA |
| | GGCTATAATTTTTATTTTGCCCAAAAAGGCAGGACCTTATTTTG |
| | TTTATAGAAGGCAGAACCTCTTTGTTCTGCTTGAAACAAACAAA |
| | CAAACAAAAAACCTCTCCAAAGGCTCTTTTCATCCTCTGCTAAA |
| | TTGGACAATCCAGTCGGTCCCTCTGGAGTGGACTCAGTTGATTG |
| | CCTACCCAGCACCCATTTCTCCCCAACTCCCTACCTCCTTTTTAT |
| | TTCTCCTGCTTTATAGAACTCTGATTTCATACAGATATATTCATG |
| | TTCCTCCCTGGCCATGTGCCTCAAGGAAGGTAATCCCACTCCAG |
| | CTCCAGGGGGTTTTCTGATTGGTCTAAGACTTGGTTCTCAATCT |
| | CAGAGCTATTGATATTTTGGGTTGGATTTTTTTTTATTTTTTATT |
| | TTTATT |
| 20026 | CTATCTGGTGGAATTTGAAATATTTGTGTGATCCAGGCACCTAT |
| | CTTTAAAAAGGATGGAGTACTTGACCTTCCATCCTTGTCCCATG |
| | GCCCTTCTTCCTTTGCTTGTTCAGTCAAGCCAAATCCCACCACGT |
| | CTCTATCATTGTAAAACTTTTCAGGGAGAAAACCTCAATGGAAC |
| | CAGGGAAAGCATACCTACCAGGTCTTTTACTTTTACTTTTTTTTT |
| | TTAAGGTTGAGTTCCACACACTGTTGGTGGCACCTAAAAAACCA |
| | CTGCCACCAGTTGAAAAGTTAATTATGGATTACCCCTTGAAATA |
| | AAATACAAGTTTTATTAGAAGTGGAGGGATAAATCAAAACAGC |
| | TGGAGGGGGAATGCCATGAAACTGCTATGACGAAGCCCATGAT |
| | GTTCTACTTAGAGTAAACATTCTTTTTATTTTATTTTTTTTAAGT |
| | CCTGGGTCTGCTGTGTAGAAAGTCATCATCGCTTTCATGTGGGA |
| | CAAAAGAGGATTTGGNAAGGGAATTTCCTTAAATCTGTGCATT |
| | GAAAATGCAGCTTATGGGAGCCTAAAGAAAATACGTTTTGCTTT |
| | TTCTTACAGTGGGTGCCTCTTAATTGTGACTTTTATAAACCCCTT |
| | CTGTAGCTATCATAACCATCCAATTATCTAACTTCATTTTCGTAT |
| | GATTAAAAGAGCCTCTCTTGCCGAACATATGACAATTATTAGAA |
| | CGTTTCTAAAATCTTTTTTTCTAGTGATATGAAACTCCTGTAGAT |
| | AAAATAAGTCTTGATTTATACAATCCTCAAGTACATGTGAATGT |
| | TATGTCTATAAATAAATACTCCATAGTAGATGCAAAATCCCTTT |
| | ATAAGTAACAATACATTGGCATATTCATTGACCAAAAAGCCTTG |
| | TGATGTTAATGTTAACAAAATTAAACTTCAGCCATTTCATTCAA |
| | CTAGTAATTCCTGAGTTCTAAGGACTAGGCACTATGCTAGGCAG |
| | GGAAGCTATATATGTATGTGTGTCTGTGCC |
| 20027 | ACCATCCATGGTGAGCGGCTCTAACTTTCAATCTGGCCAGATCA |
| | TTTTCCCCTTGTATTAAAATTGTCCTGGAAAACCATTAGGTTGA |
| | TTTTCAATCATCACAGCTAATACATTCCTTGTTGCAAATGCCAA |
| | GTATTCTGCACTTGCTTCAGTTTTTCAGATCTTCTCTCTCATATT |
| | CAGTACCTGGGGTGAAATCCATGCCTAGTAAAACAGCCCTTTTG |
| | TATCCAGGCCAGGATGCATCTCTGAGACTTGAATGCTTTTGCTT |
| | TCTCTCCTGTTTTTTGTTTTGTTTTGTTTTGTTTTGTTTTGGTTT |
| | TGTTTTGTTTTGTTTCTCTTCTCTGCCTGATCAATACTTTCCCAT |
| | CTGAAGAAGCAAAACATTCTCTCTCTTCTGTTTCCCTTGCTGCTG |
| | ATTCTGGCTCAAGGGGATGGGGGCAGGAGTGGAGGAAAGAGGGTC |
| | AGAGTCTATATTTAACCACAAAGATAATTCCTCCTTGACAGCAG |
| | CTCCAGAGAGANTTTGACATTTGAGGGGACTGAGTAGCAAGAG |
| | TAATTTGCATTTATCTGGCTATAGAAACAGAAGAGATTGGGAG |
| | CAACAAGTGATCTGTGGAGGTAAAAATGAGTCAGGGGTTTGGA |
| | AGAGGGAATATAGGGCAGGTGAAGAAGAAGAAATTATTTGCCA |
| | ACAATGATGGAAGGATAAAGAACAAGACTCCTGAAACTATTTC |
| | CTTAAATGTCACACTAAAGCAACTCCAAGAGGATTGTAATAGC |
| | TTTGGAGTGGGACAAGTGGCACAGATGGGAAGGCTGACATGTC |
| | CCGGCTGCTTAAATACTCTGAATTCTAGATCTGCATTTATCAAA |
| | ATTTAATGTACACCCGAATTGCCCTGGATCTTGAATAAAATGCA |
| | TATATTAATTCAGTAGGTTGGGGTGGGCCCCAAGATTTTGTATT |
| | TTTAGCAAGCTTCCAAATGAAGCTGATGTTGGTCCTGGGACCAC |
| | ACTTTGATTAGCAAAGCTCTGCTAGAGCGTTTTGG |
| 20028 | ATATTCTTTC CTGTCTGCTG CCTTGTAAGA CGTGACTTTC |
| | GCTTTCTGCC ATGATTGTGA GGCCTCCGTA GCCATGTGGA |
| | ACTGTGAGTC CATTAAACTT CTTTTTGTTT ATAAATTACT |
| | CAGTCTCATG TATGTCTTTA TCAGCAGCAT AAAAACAGAC |
| | TAACATAACC CCCCTTTCTT CCTACCCCTG TGATTTGGGT |
| | GGATATTAAA ATTTTGCAAG CCGCCACTCT AGAGAAGTAC |
| | CACTCAAACC ATGGTCTGCA GACTACCAGC ATTAGCAAGG |
| | CCTGGGAGTT TGTGAGAGAT GCAGATTCTT GGTGCCCATC |
| | CAAACCTACA GAAGCAGAAT CTCTGGTGGC AGGAACCAGC |
| | AATCTGTGCT TTCAACAAGC TCTCTGAGTG CTTCTTCTGA |
| | ATGTTAAAGT ATAAGAACCT CTGCTGCACA GGGAGACCTC |
| | ACTTTCATTA TTCTCATTTC ACAGATGAGA AAAATGAGTC |
| | AGTAGGAGGA AAAGTGATTG N CTCAAGTGCT TAATAAGTGT |
| | CTAAGCTAGG ATTTGACCCT AGGGCTTGTG AATCTGGAGC |
| | CCATAGACTC AACTCCTGTG CTATACTGCC TCTGTGTCTT |
| | TGGTCTGTGT TCTCTTCTTT TTTTTTTTTT CTTACCACCC |
| | TCCAAAATTC TTATTTATTT ATTTTCTATC ACCGTACTTA |
| | CTGGTGGAGT GGAAGTCCCT TGGAAGTGGG GGACGTGTCT |
| | GATTTGTGCA TGGCTATTTT GCGATTTGCC ATTGCTGGAA |
| | TATTTAGCAA GCATCAATGA GTCCTGGAGG GCTTTTAAAC |
| | CATAGATGAT CAGGGCCCCT GCTTGGTCTA GGATGGAGCC |
| | TGCAATTTTG CATTTGTGAC AAGCTCCCAC GGATGCTGGT |
| | GCTCACTTGG CATAGCAAGG GGTTATGCTA TTTTTCAAAG |
| | GCAAGAGAAG TGTGCATGTA CTTGAGAGGA GAAGGGGTCG |
| | GTCACCATTT ACTTTGTGCC TCTTGCTACC CTTCGTTGCC |
| 20029 | TAAGTTCAAT TATAATATGT ATAGGAATAA GGTACCTCAA |
| | TATGTAAAAA ATCATCAAAT GAACTGGGCA GTGAAAATCA |
| | ACTGGCTTTA ACTGTTCATC ATATTTGAGT CATTTCTCTC |
| | AAACTCAAAC ATACTAAAAC TTCTTCAGCA AATCCATCAG |
| | TATTTGGTTT TCTTTTATAT GCTGATAAAA TCATAGATAA |
| | TCTTACAATT GACATCCTCC AAAAGATTCA AAGCTGATTC |
| | GAACCTTGGA GTTCAGGTTC CTGGCTTCTC TGTCTACTGG |
| | GGGTCAGGAT ACAGGAAGCA CAAGGAGGAG GGGAGAAGAT |
| | TGTGTGGGCA AAGGGGCAGG GAAGGGGCCA CCACTCACCA |
| | CCACTGCAGG ACGAGGCGCT GAGTAAGGGA CGGGGCTGCT |
| | CCCAGCAGAA TCCACAAAGT AGCTCATTCT GCTCTCAGCA |
| | CCTGTGTGAG AGAAGGCGTT GGCTGAGCCT CTGGATGCTC |
| | ACAGGTTTGT GGATTAGAAT M CACAAGGAAG ACACGAACCT |
| | TAGAACTAAA AGTCTCCTTA GGAGCCAACC AGTTCACTTC |
| | TTTGCATGGC AGGGAAAGCA ATGGAAATTC AGAAAGATCA |
| | GTGACTAACC CCCAGCACCG GTAAGAGCAG ACCTCAGACA |
| | GAACCAGTTC CCTGGTTGCA AGGTAACATG GATAACAGAC |
| | CATGTCTACA CACTGCAGAC AGCAAGCAGT AAACCAGTGC |
| | ACAAGAGGCA CATTTTTGTA GGGTTTCTGA GCAGGAACCA |
| | GTTCTTGTGT GTCTCCCCCA CCCACAACCA GGCCTGGCAG |
| | ATAAGTAGGC ATACAATACA CAGTTGGGGT GTAAATTAAT |
| | TGATAAAGGA ATAAACATAG AAAGGATTGG AGAAAGGAAG |
| | GATGGAAAAA GCTCTCCTGA AGAGGTATGT CACCCAGTAA |
| | CCCAAGAAAC AGATAAACAG AGAGAAACCC TGCAAAAGGG |
| | ATTGAGCATT ATTGATCTTG AAAAAAGGAG AAGGGCTATT |
| 20030 | CACGCCGCAC AGCTGCCACC GCCGGCCCTG GCCCGGGAGA |
| | GGGGGGTCTC TGGGGATCTT AGCAGGCCAT GGTGGGGGTG |
| | TCTTGGGGCC AGCCTGAACT GAAAGACCAT CACAGCTTGC |
| | AAGCCACCTC CCTGCTCTGT TGCTGGCTCT CCTTGAAGAC |
| | AAGTGTTTTT CAATTAACCA AAGCGGTGCA TGGCAATGTG |
| | ATAGGGGAAT GAAACACAGC AACAGAATCA ATGCCCCACG |
| | CTGGGCAATA GCCGACTTTC TGTTCGCTCC CATCCCTTCC |
| | TTCCCTCCCC GCCTCCTTCC CCTGCTCCTT CCATTCCACA |
| | AACATTTATT GAGCACCCGC TGTGTGCCAG CCACTGTTCT |
| | AGGCCCTGAA GACACAGAAG TGAACAAAAA AAAAGAGTCC |
| | CTGTGCACAT CCTGGAGGGA CTTTCCCCGT GTGTGTGTGT |
| | GTGTGTGTGT GTGTGTGTCT ATACAGTGTA TGGAGACAGT |
| | GGATAATAAA AGCTGTTTAT S AGGCACTTTC TCTGAGCTGT |
| | TCCATGTGCT TCACTTATAC TCATTCAGCT AATCCTCAGG |
| | ACACCCCCGT GAAGTCAGTG ATATTAGTCA CAGAGGCCCA |
| | GAGAAGTGAA GTGACTTGCC CAAGGTCACA CAGCCAGCAA |
| | GAGGCCAAGC CCGGATTGAA CCCCAGCCGC CTGGCTCTGG |
| | AGCCTGCAGC ATAACCACAG CAGGGAACTG CCACCGGAGA |
| | CAGACATCGA CAGCCACTAG GAGATGTTAA CCAACAGGCT |
| | TGTCTTCACG GCACGGCCCC CGCTTCACCA GCTGCACTGT |
| | TTGATGAGCT TTGCAGGTCC CAGATCTTAT AAGCTCATGG |
| | TGATTGATCC AAATGATGCA GAGGTCGGCC TAAAGTTAGA |
| | AGTGGGCCCC TCTCTGCCCC AAGACAGCCC TTCACCCCAA |
| | TTCCATTCCC ACAGTTTGGG CATCCACCCA GGCTGCCAAG |
| | CCAAGCGGGG GCTGCCCGGG TTAGCAGGGA CCTGGCCATG |
| 20031 | GGCAGCAAAT TCCCCTCGTG ACTCCAATGC CCCTGCCATC |
| | TTGGGTCTGG GAGCCTTTGC ACCCTGCACG CCACAGGCTC |
| | GCCACCTCCT CCCGCCAGCC CCCAGGATGC CTTCCCCACG |
| | TGGGGGCCCT TAGTGGCCGG GACCACTTTG GTAGCAGTGC |
| | TTACCCCAGC CCCCCAAACC ATCAGTTTCT GGGGCCAGCT |
| | CCCCATGAAG CAAGAGCCCC AGGAGCAGGG ACATCTCCTT |
| | CTCTGATGTC CCTGCACCTC CAAGGTCTGG GAGACGCTCA |
| | TCCCTCTTCT CTGTGGCCTC TGCCTGGGAA AGCTTGGGGG |
| | CTTTGTAAGT CAAAGGTTGG TCTTGTGGGA ACCTCCCAGT |
| | GGGCTGTCCC TGAGCCCTGG AGCCACAGAA ACCCCTGCCC |
| | CACCCACGAT GGCTGTCATC TGAGTCTGCA TGGAGGTGTG |
| | TCTGTGCCAA GTGAGCACAC ATGCACCAAG GCGGCCCCTG |
| | GCCACCAGGG GCTCTTGAAG Y CTGCAGGCGG CCCTTCCTCT |
| | CTCTCCCACT CCCCCTGTTG GGGCCACCATTCTGGCTGGC |
| | AAGATGGCTG TGATGGCCTC CAGCAGGCCC CCTGCCTCCA |
| | CCCTTAGCCC CTTCAAGCAT TTCCCCAGAG CCACCATCTA |
| | AACGACAGCT GTGAGAACTC CTCTGTGCCC CCATTTGTCT |
| | CCCACAGTGC CCATATTCAT CACCAGCCCA CAAGGCCCCT |
| | CCTGTCTATG GAGGCCTCCT CAGGACATCT GGGGGCTTCC |
| | TGGGCCAGGG TGGGGGGTGC CTGCTCCAGG CTGTTTCTGG |
| | CTTGTCCCCT CCCTGGGTGC TGCCTAAGCA GCGGCCTCTG |
| | TGTCCTTTCC TTGGACCCTC AGCACCCCTG CATCTAACCT |
| | ACCCCCACCC CGAGCTTGCC TCAAGACCCA GCATGGACAG |
| | GGCCGCCTAC CTGAAGGTGT GGGTGGCGGA GGGCTAAGAC |
| | ATTTGGGAGG GCTATGACAT TCCGGGACCT TTAAATTCTT |
| 20032 | ATATATTGAT CAGTTGATGA AAATGTTGTG ACCAGGGCTC |
| | TCAGGAACTT AACCATATGT TTCCCTGGAG TGATGGTTCA |
| | GAATTTGTTA ATTCAGTGTC CCAAGTGAGT TTATAGAATA |
| | ACCACCACGA ATAATGAGAA GCAACGGCAC AAACTTTGTG |
| | TACACAGGCA TTTTTTGAGA GAGAGAGAGA GCTATAATAT |
| | TTATCAAATT CTCAAGGGGG TAACTGAAAA ATGTTCAACC |
| | ATTACTTCAG AACTTCTATT ATGAGACAAA TAGTGCTGGT |
| | CCTCTTGAGA AACCAAGGGA GTGGGCTCAG CTCAGTGACT |
| | GTCTGGATCA GCCCAGAAAC AATGTAGGCT GCCATCTTGA |
| | TCTGTGCTTT TCCCCAGGGA CATGAGCAAG GGCACTTCTA |
| | GGCCAAGCAA AATCAATCGT GTTTCATAGA TTTGGATTTA |
| | GAGGGCGCTC TAAACCAGCT CAGAGGAATG GTATGTTTTA |
| | GAATCCTAGG GAAATTGAGT W CTCCAATCAT CACTTCAGTC |
| | AGCTAGGAAA GATACACTTT TGGCAGGGTG CGGTGGCTCA |
| | CGCCTGTAAT CCCAGCACTT TGGGAGGTCG ATCACAAGGT |
| | CCGGAGTTCA AGACCAGCCT GGCCAATATG GTGAAACCCT |
| | GTCTCTACTA AAAAATACAA AAATTAGCCA GGTGTAGTGG |
| | CATGTGCTTG TAGTCCCAGC TACTTGGGAG GCTGAGGCAG |
| | GAGAGTCGCT GGAACCAGGG AGGCGGAGTT GCAGTGAGCC |
| | GAGATTGTGC CACACTCCAG CCTGGGCAAC AGAGCGAGAC |
| | TCTGTCTCAA AAAAATAAAT AAATAAAAAA GATATCCTTT |
| | TAATAAAGAA AAAAAAACAA CACATAAAAC TTAAGAGTGT |
| | AATAATAGCT GCTGTTCATT GAATGCTTAC CAGGAACTAG |
| | TATGATCATA AGGAACTCTT ACAATCACCC TGAGAGGGAG |
| | GGCATGGCAA GCCCTAATTA ATGGATGAAG AAACTAAGGC |
| 20033 | GGTCATGGTG GCTCACGCCT GTAATCCCAG CACTTTGGGA |
| | GGCTGAGGAA GGAGGATCAC TTGAGGTGAG GAGCTTGAGA |
| | CCAGCCTGGC CAACATGGTG AAACCCCATC TCTACTAAAA |
| | ATACAAAAAT TAGCCGGGCG TGGTGGTGCA CACCTGTAAT |
| | CCCAGCTACT CGGGAGGGTG AGGCAGGAGA ATTGCTTGAA |
| | CCTGGGAAGT GGTGGTTGCA GTGAGCCGAG ATCTCACCAC |
| | TGCACTCCAG GCTGGGCAAC ACAGCAAGAC TCTGTCTAAA |
| | AAAAAAAAAA AAAAGAAAGA AAAAAAGAGT TATATTATTT |
| | ACGACTCTTT TAGCTTCACT TTCTTATAAG ATTGTTGTGA |
| | GAAGTGAGTA AGACACATGC AAAGTGGTAA ACTGCCTGGC |
| | TGTCATAAAA GTCTTGGCTA CTATCACGGC TGGGAGGCAA |
| | AGGAGATTCA GAGAAGGGCA GAATGACTGC ATAAGGTGAT |
| | CTGCCTGTAA CTCGTGTTTC Y TCCTTTCTAG TATAAAGAGA |
| | TAAAGGACTT CAAGGTCTTA AACTGGTGAG GGAGTATTAC |
| | AGCCTTTGTA TGGAAAGGTT TGACTTTGTG TCTCTGCTTA |
| | AACCCCCATT GTGTTGCCCC TACCAATTAT TGTGCTGCCC |
| | CCTTGTGGTT AACTGTGCTA AGACCTTTCT TTTGCTCTTC |
| | TCCCATTACA TTTCCCACCC TTCCCCACTC CCTTTTAGAC |
| | CCCTCCTCTT AGCTCCCAGT TTCCCAAACT GTGTGCCAAG |
| | GTGCCCAGAG CACCTCAGGC TTGAACTTGT GTTTTGAGTT |
| | GGTTCATGGT TTCAATATTA GATACCTACA CCCGTTTCTA |
| | CAATGTCATG TCTTTGTAAA GATGTATTTT CAGAGGTTGC |
| | TCCGATAAAA AGCAACTACT ACATGAAAAT GAATGTAGAA |
| | CAGGAAATGA CAGTGTGGTA TTGTCCAATT TGATTCTAAG |
| | GTTTGATAAG TTCTACAGTG CTCTACACTA AGTTGTAAGG |
| 20034 | TTAGCTTCTG CTTGAGCATT TCTACTCACT GGAGTTCATT |
| | ACTTTCTGAA ACTGTTTCCT GTTGAACAGC TTTAATGGTT |
| | AGAAATTTCT TTGTTATACT GATCCCAGGC ATGCATCACG |
| | GTGATTTCTA ATAATTGACA AAATTATTCC CCAGTTTTCT |
| | TAATCTCTTC TCTACCTGAC CTGGTTCATA GTAATATATT |
| | TATATTCCTC AATATGCATT CTACTATAGC AATATTTATT |
| | TTTTCATTCT CATTGGAGAA TTGTGGATAA TGTATTGACT |
| | TCAGAAAATA TACATGTGTA ATCAGTATAC AGGTAGACTA |
| | CTGTGAGGGC CACCTTAGAG GGCTGTTTTT GGAAGCTCAG |
| | GATCCAATAA ATCTAACACC CAAGACCCAT GATTAGCTCT |
| | TCATGGGTAG TTGAGGTCTT TCAGGGGGGT TTATTTTTGG |
| | TTAGTTACCT ATCTTAATCT TTTTGGTTCA TATCTCTTAT |
| | GGGGAGAGAG GTAGGGAGGG R CATGGAAAAT ATCCTATCAA |
| | ACCTCCATTT ATAATTGTGC TCACTATCTT ATAAATAAGA |
| | CAAGTAAATT TTTCTAAAAC TTCGGAAGTT TTCTTGATAA |
| | TTATATAGTC ATTTAAGGAT TAATGAATTC TCTAAAGTTT |
| | AGCCAGTTAT CCATATTAAT GGTAGCTAAA AATTGAGAAT |
| | GCCACAAAAA TTTCAGACAT CTGACTTTTT AAAAATTAGA |
| | ATTTTTTGGC AGGGTGTGGT GGCCTGTAAT CCCAGCACCT |
| | TGGGAGGCCG AGGCAGGCAG ATCACTTGAA GTCAGGAGTT |
| | CCAGACCAGC CTGGCCAACA TGGTGAAACT TTGCTCTACT |
| | AAAAAATACA AAAATTAGCT GGGCCTGATG GTGCACACTT |
| | ATAATCCCAG CTACTTGGGA GGCTGAGGCA GGAGAATTGC |
| | TTCAATTTGG GAGGCAGAGG TTGCAGTGAG CCAAGATGGT |
| | GCTACTGCAC TCCAGCCTGG GTGACTTGTG ACTGGGCAAC |
| 20035 | CCTCTAGAAT CCTTATTGCT GTTCCCACAT TCTGATCATA |
| | AATTTGGATA AATTCACTGC TACTCAGGCT TCAAGCTGAT |
| | ATAATGAATA GAGGGAAAAT AGGCACCCAA AGTCAATAAG |
| | AAGCACAGGT GATGATGCCC CTGTGATTTG TGGGATTGTA |
| | AAAATACATT GTCTTCTGTT TTCCCTTTTT GCCCAAATCC |
| | AAATTTAGAA GAGAACATTC TGGGAATGTA TACGTAAGAA |
| | CTGCAACATG AAGGAACAAA CAATAACCAT GATAAAGCAA |
| | GCAGGCAAAC AAAAAACAGC CCTGTGACTA TAACCACAAA |
| | GCTGGGCAGC ATATAATTCT AATTTAATAG TAGCTGGAAA |
| | AGGCTTCTCT CTACTCTATA GTCATGGCCC CCATGCTCAA |
| | CATGGAACTC CTATATTTTA GCTTTTAAGT CATCATAAAA |
| | TATTAAGGGG CCCATATTCT TTGACTCCCT AGGTTTCCAG |
| | AATTACTTGG ATTTTCTGAG S ACATTTTCAT TTCTTAGTGA |
| | CACATGCAAT GTCAATAGAT TITGGAAAAG TATTTCTCAT |
| | GTTCCCTATT TACCTACAAA ATTCTTCTAT GCATCTTTTC |
| | TCCAAGAAAG ATTTAAGGAT GAAGAAATTA CTATGATACA |
| | TTAAGAAAGG CCAAAGGAAG TATACTCTAA TATATACCAC |
| | ATTATGTACT TAGGCTAAAA AACGTTTCAT TCCTTTGTGA |
| | TATTTTCTTC CTTCTGTGTA AGCAATTTGT CATATTTTCT |
| | AAAACCATGT TTTTAAGATT TTTCTTGGCT ACTCTTTAAA |
| | CTTATTTACT TCTGAAGTAT GAAAAACACA GTTCTCTTAG |
| | TTTGAGTGCA ATGTGCACAT ACATTAGGGA AAGAACAGCC |
| | TATTCAATAA ATAATTCTGG GAAAACTGAA TATCAACAAG |
| | CAGAAAAATG AAGCCAGACC CCTCTCACCA TATGCAAAAA |
| | TCAACTCAAA ATGAATTAAA GACTTAAAGC AAGACCCAAA |
| 20036 | TTCTTTCTTATTTATTTGTACATTATCTGTTTGTATCCTTGAATT |
| | TTCTCTGGGATGTTATAAAAGAAAAATATTACAAGCATAATTTCT |
| | GACACAATGTTTTATAACTGTTTTCAAAAGCAATCTATTTCTCTC |
| | TTAATTTCTATAGAACCCATTTTAGTCATTCCTATGATGAATGA |
| | AAAAAAACTCACAATTAGTIGTCAGTTTCAGAAAGGAGTCTCA |
| | GAAGCATCTTAGAACCACCTAGGCGGTCTTATAGGCGTCACAG |
| | AAAAATATTCCACCTTACTTATTCTTATCTTCTTCAAACTGACTC |
| | CAAATATAATAAGCAGGCTTAAGTTATATAAGGTTCCTTAAAA |
| | GTTGTTCTCAAAAACAATTAAATGCAGACTGTCCTCAGTAAAAC |
| | TTGCATTGGCCCAGTCCATTTTACCAAGTTTGCTCCTTCTTACAT |
| | GTACGACTGCCCCTGTGACAAGTTTAAGCCTACGTTAATTAATC |
| | ATCTTTCCATAACANTGAGACATATTCATCCAACCCTGAGAGGG |
| | ATAAGGGGTAACAGGCAAGATATATTCAAATTGTGACATTTAA |
| | GGTCAACTTGACTTTAAAACTCATATACTGCTCAGTTTTCATAT |
| | ACGTGGCTGAAAACAAGTCATCACAGAGAACTGGTCACACTGT |
| | TAGAGGACCAAAATAGTAAAATATGAACAATTCTTCCATATTTA |
| | ATGATATTAAATATAACAGGTCCTATGTCTATGCAATTGAAGTC |
| | AACATGTCACTAATTAGGGCTTCCTTTGTTATCAAACTTGCTGA |
| | GAAGATAGAACAGTGAGGAAAAAATAGCAGGAATTGAGCTGT |
| | ACAGAATTAAAGACATTCTTATGAACCTTAAGACTTAAGGTCA |
| | GTCACACTCATATGACATTTGGACTATTAGACAACTCTTCTGAC |
| | CTCAAATTTTGCTCTTACCAGTTGGTGATAATCCTTTGGTAAGA |
| | GAGCATGTTAAAAGTAACCAAATCAGATAAGGACTA |
| 20037 | TTCTGAGCAC TCACATTTTA ATGCTGGGAA TTTTATGCTG |
| | AGGTTCAGTG CTTTTCAGGG AGCCATGAAC CCCCTGCAAT |
| | GACTTGCAGA CTGTAGGTAT TACATGTAAA ACTTGTGTGA |
| | GTAATTTCCT GAAGAAGGGG TTTCATTCTT CAGATCCTCA |
| | AAAAGATCTA TGATCCGGCC AGGCGCGGTG GCTCATGCCT |
| | GTAATCCCAG CACTTTGGGA GACCAAGGCG GGCATATCAG |
| | GAGGTCAGGA GATCAATACC ATCCTCGCTA ACACAGTGAA |
| | ATCCCATCTC TACTAAAAAT ACAAAAAATT AGCTGGGTGT |
| | GGTGGCGCAT GCCTGTAATC CCAGCTACTC GAGAGGCCGA |
| | GGCAGGACAA CAGCTTGAAC CCAGGAGGCG GAGGTTGCAG |
| | TGAGCCAACA GAGTGAAACT CTGTCTCAAA AAAAAAAAAA |
| | ATATATATAT ATATATATGA TCCTAAAAAG ACATTGATAT |
| | TAAAGAGTAA TGATGGGGAA R GACCACCAAG TGATCATTTA |
| | TAAGATGCTG CGAGAATTGC TAAAGTTGAG GGATGGATTC |
| | TGCATTCCAG GAGAACAAAG GAGGTAGATC CCGATTAACT |
| | GAGTAGCAGG ATATTGAGGG AAGCTTCTTG TAATGATTCA |
| | GCTGAGTCTT ACACAATGAA TGAGACTTGG ATAGATGAAC |
| | ATGCATTAGG AGACATCAGT TCTGGTCAGA GGAAACAGCA |
| | AATGCAAAGG CCCAGAGCCA TAAGAGATTC AGATGCACTA |
| | AAGAAATATC CCATCATTTA GGATGGTCGG CATATACACA |
| | GAGGGCCTAT AAGGAAGGAG AAGAAACTGA GGTTGTAGAA |
| | GCTGGTAGGG ACTGCATGCT GAAAGGCATT GTAAATCTTA |
| | GACTAAAATC TGTGGGAGAC TTTGAACAAC CTAAAGATTT |
| | TAAGCAGAGT GATGCAATGC ATTTGTCTTT TGAATGCAAA |
| | TATTGCTGGG GCGGGTCTTT TGTGTTATCA GCTAATGATT |
| 20038 | ATATTCTTTC CTGTCTGCTG CCTTGTAAGA CGTGACTTTC |
| | GCTTTCTGCC ATGATTGTGA GGCCTCCGTA GCCATGTGGA |
| | ACTGTGAGTC CATTAAACTT CTTTTTGTTT ATAAATTACT |
| | CAGTCTCATG TATGTCTTTA TCAGCAGCAT AAAAACAGAC |
| | TAACATAACC CCCCTTTCTT CCTACCCCTG TGATTTGGGT |
| | GGATATTAAA ATTTTGCAAG CCGCCACTCT AGAGAAGTAC |
| | CACTCAAACC ATGGTCTGCA GACTACCAGC ATTAGCAAGG |
| | CCTGGGAGTT TGTGAGAGAT GCAGATTCTT GGTGCCCATC |
| | CAAACCTACA GAAGCAGAAT CTCTGGTGGC AGGAACCAGC |
| | AATCTGTGCT TTCAACAAGC TCTCTGAGTG CTTCTTCTGA |
| | ATGTTAAAGT ATAAGAACCT CTGCTGCACA GGGAGACCTC |
| | ACTTTCATTA TTCTCATTTC ACAGATGAGA AAAATGAGTC |
| | AGTAGGAGGA AAAGTGATTG N CTCAAGTGCT TAATAAGTGT |
| | CTAAGCTAGG ATTTGACCCT AGGGCTTGTG AATCTGGAGC |
| | CCATAGACTC AACTCCTGTG CTATACTGCC TCTGTGTCTT |
| | TGGTCTGTGT TCTCTTCTTT TTTTTTTTTT CTTACCACCC |
| | TCCAAAATTC TTATTTATTT ATTTTCTATC ACCGTACTTA |
| | CTGGTGGAGT GGAAGTCCCT TGGAAGTGGG GGACGTGTCT |
| | GATTTGTGCA TGGCTATTTT GCGATTTGCC ATTGCTGGAA |
| | TATTTAGCAA GCATCAATGA GTCCTGGAGG GCTTTTAAAC |
| | CATAGATGAT CAGGGCCCCT GCTTGGTCTA GGATGGAGCC |
| | TGCAATTTTG CATTTGTGAC AAGCTCCCAC GGATGCTGGT |
| | GCTCACTTGG CATAGCAAGG GGTTATGCTA TTTTTCAAAG |
| | GCAAGAGAAG TGTGCATGTA CTTGAGAGGA GAAGGGGTCG |
| | GTCACCATTT ACTTTGTGCC TCTTGCTACC CTTCGTTGCC |
| 20039 | AAAGCTCAGT CCCAGATCCT CGGCCATGCT CCTGCTGCTC |
| | CTGGAGGCAC CTCTGACTCC TGGGCAGAGA GAGCCCCCAT |
| | TAAATAGAAG ACCAGCTCTC ACAGTGGGTG ACTTAATCAC |
| | TCAGTCTCCT CCTTCCCTTT TCCTCTCCCC TCCCCTCTTC |
| | AAGAGCACAC TGTGGCCCTA CCCTGCTAGA GAATGCACCG |
| | CCTACAACAG AAACCAAGTT TGGTTTGAGG AAAAAAAAAA |
| | AAAAAAAAAA AAGAAGAAGA AGGAGAAGAA GAAAGCTTTC |
| | CCAAGCATAT TTATATACAG TATGCTCATG TGCTCCTTCC |
| | TTCGTTTACA GAAGGAAGTT AGGAAAGTCC CTGAAGGAGG |
| | AGAGAAAGAA TTCATCAAGT CAGTGGGTGG GGCAAATTAA |
| | AATATACCTG TTCCCTGCAC TGGAGGCTTA CCAGCTGTGC |
| | CAGTCTGGGG AGTGTGCTTC TGGAAGTGAA AGTGAGGGAT |
| | GAGAGGTGTG TGGTTTGCAG R TTGGGAAACG GAAATCACAT |
| | TTGCATCAGC TCTTTGCAAA GTGCTGCCTA GCCCTCTGTC |
| | ATTTTGAACC TCATAGAAAT TCATTCTCAG TGTACAGATG |
| | GGAATAGCAA AGTTCTAAAA GGTGAAGGCA CTTGTCCTAG |
| | GTCATCCAAG GATGAAGACA GAGGAGCTAG GAAGATGACC |
| | TAGTTCTAAA TCACGGCTTG GAGTTGTAAC CTCTAGCACA |
| | TGACTGCCCA TGAAAGGAAA GTATTTCCAG TCTGCATTGA |
| | CCATTGTTTA ATCAGAGTAT GAGGCCACAG ATCGAGGTGA |
| | CTGTCTGTGA GGGTAGAACA TTAACCACTA CTCCCTGATT |
| | AGTCTAAAGT TAATTGATCA TGTGATGTGC TTTGCCTGCA |
| | GTTGGGTGTG GGGGCCACAA CATGTAATAA AAGATTATAT |
| | TTATTAAGTG CTTACTTTGT GCCAATCACT GCTCTAAGTT |
| | AAATACATCA ATAAAATTAT TCAATCCTGA GATAAATTTT |
| 20040 | CTCAGCA CTTTGGGAGG CTTAGGCAGG AGCATCGCTT |
| | GTGTCCAGGA GCTTGAATCT AGCCTGGGCA ACACAGTGAG |
| | GCCCCATCGC TACAAATAAT CAAAATTAGC CAGGCGAGGT |
| | GCATGTGCCT GTAGTCCCAG ATACTCAGGA GGCTGAGGCA |
| | GGAGAATTGC TGTCCTCCTG CACCAGAAGC CTCCAGTTGC |
| | TTTGTGTCTC AGTGGCTCAC CCTATTCTGG ACACTTTGCA |
| | TAAACAGAGT CCCACAGGCT TGTCCTCAGG TGTCTGGCTC |
| | TGTCACTCGC ATAATGGCCT TGAGGTTCTC CACGCCGCAG |
| | CGTGCGTCAG GACAGCGGCC TCCTTCCTTT TTCAGGCTAA |
| | TTCTCCCCTG CACGCATGGA TCACGTTTGG TGCATCCGTC |
| | CACCCACGAG GAACACTCGG GTGGTTCCTA CCTTCTGGCT |
| | GCCATGAACA TTCACGGACA GGCATTTGTT TGAGTCCCTG |
| | TTCTGAATCC TCTGGCCTAT ATC S |
| | CTAGGAGAGA ACTGCTGGGT CCTGCAGTGC TTCCACGCTG |
| | AGCTTTTCGA GGAACTGCCA CAACGTTCCC CATGGCAGCT |
| | GCGCCCTTCT GCTTTTCCGC CACGATGCAC AAAGCTAACA |
| | ATGCCTCTGG TCTCTGTGTG CAGTGCCCTT CAGAGAGCCG |
| | TCCTCACCGG CAAACAAGCA GCGGCATCCC CCTGGGAGCT |
| | TGTTCTGAAT GCCCGGCGCG TCTCCAAACA CACTTGGAGA |
| | AACCACCTGG ACGGTGCTCA ACCTTGAACC TCTGAAGCTT |
| | TTAGACACTG TCCCGATGCC AGGTGCCAGC CCAGAGCTTC |
| | AGGTGCAATG GGTCTGGGCA TGGGGGCTTT CATAGGCTGC |
| | CCAGATGACC CCACTGTGTG GCCGGGGTTG AGACGACAGC |
| | CCTGGGAGAA GCTTCTGCTG CCACCTGGGC TGCTCTGCGG |
| | GGAGTATGCT GGC |
| 20041 | AGACACACTT CGTGACCTCA CTAGGATTTG CTTTACAAGA |
| | TAAGATTTTC CTGGCAAGCA TTGAAGTTAG TGCCCAGATT |
| | CAAAACAGCA AACTTAAAAC TATTATCTTC ATGCTTGCTA |
| | TAATCAGGTG TACCGCCCAA CTTCCCATCC CTACCTCCCC |
| | TTCCCTAGTA ATCCAGAGGT ACTCAAGGTC ACTACTGGCT |
| | ACTTAAGGTT TACATCCACT CCCAAGGAAA CACCAGCAAC |
| | CAAAAGAATA CTTCCCAGAT GGAAAACCCG TCATTTGACC |
| | TTGGAATGCT CTGCCTCCCA TAATGACCAA AATAAGGTCC |
| | GGCCAGAGGG GCTTACGTTT TTTGGTAAGG AACAACACAT |
| | TGTTTTAGAG AGATAATCTG ACATAACTCT GCTAAGCTCT |
| | GAGTGTCTAT GCATGGTACC ACAGCAAACA CCCTATGTCC |
| | CAAATGGAAA CTAGCAGGGT GAAAAAATTG TTCATCTAAG |
| | ATGACATTAA TCTCTGTATG H CTCCTTGGTA CAGTTCTTTT |
| | CCACAACATG CAGCTTAAGA TTCAACAATT TTTTCATTGT |
| | GTTTTGTGTT TCCTGAAGCA TTCCTCCAGC TACCTGAAGC |
| | TCTCACTGAT TAAAATAGAC CTCCTTTACT AAAAGGGGTA |
| | AACTGAGGCA CAGAAGAACA AAGCAATGTG CCTTATAGTT |
| | CAGAATAGGT AAACAAAAAT TGGACATCTA TTATTTTCAA |
| | ATCTCTTTAG ATTAAAAGAA AAAAAAATGT ATTTCTCAAA |
| | GTCCAAAGTC AACCTTCTCC AAAGGGAAAC TGCATGTCTG |
| | TCTAGTAACC TATAGGATCA TTCACACTTT TTTTTCCTTG |
| | AGAAGGAACT AACTTGCCAG CCTACCAACA ATTTTGCCAG |
| | TGCCTTGGCA TCAGGCATAT CTGCACAACC TTTCCAGAGC |
| | CTATATCATA GTGATCTGTT CAAGCTGCTC AAAGCTCAGT |
| | AATCATACTA ATCTGTGCAT AGTGACCAGT GCTACCTGCT |
| 20042 | GCTCCCCCAAAGATATTTACATCCTACCCTGTGAATATGCTACC |
| | TTACATGGAAAAAGGGGCTTTAAAAATATGATTGAGTTGAGAA |
| | TCTTGAGATGGAAAGTTATCCAGTATTATCTGAGTGGGCCCAAT |
| | GTCCTCACAAGGGTCCTTATAAAGTGAGAAATAAGAGGATCAA |
| | AGTAAGTAGTAGGTGATGTGACAGCAGAAGCAAGAGGTTGGAG |
| | TGATTTAAGGAAGTGGGAGATCAGGAAGTGTTAAGCACAAAGT |
| | TAACTTATACCTTTAAAAAAAAAGGAAAATTAAAGACAACAAG |
| | CAGATATATACATTATATAAATAAACACAAGAACTTGTTAAACT |
| | TGTGAAACACAGGACTACCCAAGACAAATGTTTCCCTTTCCATT |
| | TCTACTCTAGGCTATATGAGGAATCTATT |
| | TTTCTCTTTTTCTTAGAACTCTTACTCTGCAGGATCAAAATGTCA |
| | AGCAGTGACCACATAAGTGGGAAGTAGATCAAGACNTGCTTAT |
| | AATTACATTCTTGTGGTTGGTATAAAATTCTGTACCACAGCCAT |
| | TCCTTAGAAGCCAGCTCATGGGATCAAACAGACAAGCAAGCTC |
| | ACTTCTCAAGCCCACGATGTTACGTATTAGTCCATATTGGTGAG |
| | TTCCTTTGTGCCCAAACTTAGCTGCCGCACACTACAGTGATAGG |
| | AAACTGCCAACAGTTTTTTGTCAAACCCACTACAGTGGATCCCA |
| | CAATGGGCTGAGACCTCGTCTAGAGTCATCAGGTTTTCCAGGAT |
| | GTGCAGATGGCCTGGAAACTTGGCCAAGAGGTAGGGATCAGCA |
| | CTCTTTAGTAAGCTGTATATCCACCAAATGCTGTGACACAAGGA |
| | ATGGGCCTCAAAATGTTTCAGGCCAGCACAGCTTTGTCTTTGCA |
| | AGTCATTTTTCAGTGGCAGTTAAATATTGTGGCAAAGCCAAGGT |
| | ACAGACTCACGTGCATTAAAATATGCTTATGAGTAATAATACCA |
| | TAAGTATTTCC |
| 20043 | GGGGTCAGGTTGCTGGTCCCAGCCTTGCACCCTGAGCTAGGAC |
| | ACCAGTTCCCCTGACCCTGTTCTTCCCTCCTGGCTGCAGGCACC |
| | CCCAGCCAGAACACGCAGTGCCAGCCGTGCCCCCCAGGCACCT |
| | TCTCAGCCAGCAGCTCCAGCTCAGAGCAGTGCCAGCCCCACCG |
| | CAACTGCACGGCCCTGGGCCTGGCCCTCAATGTGCCA |
| | GGCTCTTCCTCCCATGACACCCTGTGCACCAGCTGCACTGGCTT |
| | CCCCCTCAGCACCAGGGTACCAGGTGAGCCAGAGGCCTGAGGG |
| | GGCAGCACACTGCAGGCCAGGCCCACTTGTGCCCTCACTCCTGC |
| | CCCTGCACGTGCATCTAGCCTGAGGCATGCCAGCTGGCTCTGGG |
| | AAGGGGCCACAGTGGATTTGAGGGGTCAGGGGTCC |
| | CTCCACTAGATCCCCACCAAGTCTGCCCTCTCAGGGGTGGCTGA |
| | GAATTTGGATCTGAGCCAGGGCACAGCCTCCCCTGGNGAGCTC |
| | TGGGAAAGTGGGCAGCAATCTCCTAACTGCCCGAGGGGAAGGT |
| | GGCTGGCTCCTCTGACACGGGGAAACCGAGGCCTGATGGTAAC |
| | TCTCCTAACTGCCTGAGAGGAAGGTGGCTGCCTCCTCTGACATG |
| | GGGAAACCGAGGCCCAATGTTAACCACTGTTGAGAAGTCACAG |
| | GGGGAAGTGACCCCCTTAACATCAAGTCAGGTCCGGTCCATCT |
| | GCAGGTCCCAACTCGCCCCTTCCGATGGCCCAGGAGCCCCAAG |
| | CCCTTGCCTGGGCCCCCTTGCCTCTTGCAGCCAAGGTCCGAGTG |
| | GCCGCTCCTGCCCCCTAGGCCTTTGCTCCAGCTCTCTGACCGAA |
| | GGCTCCTGCCCCTTCTCCAGTCCCCATCGTTGCACTGCCCTCTCC |
| | AGCACGGCTCACTGCACAGGGATTTCTCTCTCCTGCAAACCCCC |
| | CGAGTGGGGCCCAGAAAGCAGGGTACCTGGCAGCCCCCGCCAG |
| | TGTGTGTGGGTGAAA |
| 20044 | CACAAACCAT ATAAGACATT ATTGTTCCCA TTTTACAGGT |
| | GGAAATCTGA AGCTCTGAGA GGTGGAATGA GTTGCCTGAA |
| | TTTACCAGAA TGTGGGATTT ACCAGAATGT TTACCAGAAC |
| | GAATTTACCA GTCAGGCTTT GAGGCCAGAT CTGTCTGATC |
| | CAAAATCAGT GCTCTTTCTG AAATGCTGAT GCAAAAGGAA |
| | GTCATCAGAA CTCTATAGAC CAACCCTGCA CATTTGTTAC |
| | CTTCTCCAGA AGTGCTTTCG TTGCTGATAT ACCAGACGTC |
| | TTTTGTTAAA ATTAATCTAC |
| | TACCATCACC GTATGGGGAA TAACTCTGGC TAGCCTAAGA |
| | AAAGCAACCT TACATAGGTA AAAATAATTG CACCCCTTCC |
| | ATCTGCCAAA AGAGTTCTAT TGTCGGTTTC CCAGGCAATA |
| | TATGTGCTTT GGGAAATATT GCCATTAGAC AATCTGAGTG |
| | TGGTTGCAGT AAAGTATTCT AGAATGACTG GAATACCCAG M |
| | AAACTGGGTA AGAATCATGT GTTCTGCTGT CAGCAGACCT |
| | TGTCTGGGCC TGGCAAACTC TGCCTCTGGG GTTAGCAAAA |
| | CTCCCTTACG CTCCCCTCTT TCAAACAAGA GTGATTATCA |
| | GTTGTCAAAG TTGTTACTTC TGCAGAGAAG GAAAAGTGGT |
| | TCTGGACACT GTCCACAGAT TGTTTCCTCC TCTGGGGCAA |
| | GAGGATTGGG AGAGGGGTAT GCACATGCTT TTCTCAATTT |
| | GTGGTTTTTG CTTGGGTTTG TGGTTTAAAT CCCTAATTTT |
| | GGCAATCATC TCTGCCACAG ACCATCCAAT CCATGCAGGT |
| | GGGTTCATTC CATACTCTGT GAAATATATT TTGATGTTAG |
| | AGGGGTGGGA ATGTCTGATT TATTGTTTCA TCCTCGTCTC |
| | TGGGGAGGGG AAGCAAAGCT AGTAGTAGTT TTTTTTTCAA |
| | GGGCAATCTC AGGCCATTCT AGAATGCTTC ATTGCAGCCA |
| | CACTCTGATT GCCTAATGGC |
| 20045 | GTGGGAGGAT CACTTGAGGC CAGGAGCTTA AGGCTAGCCT |
| | GGGCAACATA GCGAGACCCC ATCTCTACAA AAAATAAAAA |
| | ATTAGCTGGG CATGGTGGTA TGTGCCTGTG GTCCTAGCTA |
| | CTTGGGAGGC TGAGGTAGGG GCATTGAGCC TAGGAGTTCA |
| | AGGCTGCAGT GAGCTATAAT CACACCACTG CACTCCAGCC |
| | TGGGTAACAG AGTGAGACCC TGTCTCAAAA AAAAGAAAGA |
| | AAAAGAAAAA GAAAAGGGGT ATTTATTGAA CACCTACTAT |
| | GTTTCAGGCA CTGTGCTAGA |
| | TCCTAAGTGA ATATCAGCAC ATGAACAAGA CAAAGGCGAA |
| | AAGTTACCAA ACAAGTCTAA GTTGATTTCG GTATATGCAT |
| | CTTCCTGACT TCTGGTCCCG TGCTTTGACC ACAACCCTTC |
| | ACCACTAGAC CAGACTTCCC CAAATAAACA ACTACTTCTG |
| | CATGCTGGGG ATGGGCTGTG TGCGGCAGCA TTTACGTAGG Y |
| | GGTACAGACA GCAGCCTTTC ACTTAATGTT GCAATAACAC |
| | CAGGCTAAAC AATGTGCACT GACTTCAAAA GTGTGGGGTC |
| | AGGTCTCCTT CAAGTGCCAC AGGGAGAGTG CAAAGTAGGA |
| | AAAGTCTATC GGATGAGGAA ACACTGTAGA GGGAAAGTGA |
| | ATTTTTTTTC AATTTGGGTT AAAATTCAGA TGTGGAATTC |
| | TACCCTCCTT TTCACTTTTG GATCCCCAGA TAGGAGGAAC |
| | TCAGCACATA GATAATCATG AACTACACAC ATTTTGGTTT |
| | TATATGCTCA GACTTGTCCA GAGCATGAAA TCCCTGCCCT |
| | GTTGGAAGGC AGCGCCGTGC TCACGGAGGC ACACAAGCAC |
| | CTGTCTCAAA GTCACCCTGA CCTGCAGATC TGCAAATGGC |
| | AAAAATAATT TCACATGTTT GTTCTGATTT GTCTTCATTT |
| | TTAGGCTACC TTGTGTGAGC TCCACTTTTT AGAATGTGAT |
| | TTTGCAGTCC TGAAATGGAT |
| 20046 | GACAGGAGCT GGGCAGCAGC AGGAAGACGG GGGGCACCCC |
| | TCCTGGCGTC CTGGCCGCCG GGACACCCCT CTCCGGGAGA |
| | GGACACTCGG TGCCCCTCCG TGAAGCCGGT AACCTCGGCT |
| | GCGCCACCTC CCCCACCCGC GCGCCCGCGC CGGGAAAGCC |
| | AGCGTGGCCC CAGTCTCCGA ATTTCTCGGA ATGAACAACA |
| | GCAAATTGAA TCCAGGGCTC CGGCGGGGGC CGCCTTTGCT |
| | GGCCACTGGT TCTGCAGCCT GGCGAGACTG CGCTTAGTCC |
| | CCGCCTGGAG TGCCTCCCGA |
| | AGGCCTGGCT GGAAGCTAGA CTCAGTCCCT TTGTAGTAGC |
| | AGCGGTGGAG CAGGGACCAG CGTCTTGGAC GGGTGACCCA |
| | GACTCAATTC CGACTTTGGC CGAGGGCATG TTTGACACTG |
| | GGTGTGAAAT CTAGACAGTT CCCGCGGTCA TAGAGATGGG |
| | GCAGCAGCAT TCAGGCAGGG CTCAGAACTG TCCGGGTCCC R |
| | TCAGTGTTGG GGCGGAAGAG GAAGAGTGTC AACTGAGCCA |
| | GCATTTATT TATTTTATTG TTGTTTGAGA CAGGGTGTCG |
| | CTCTGTCGCC CAGGCTGGAG TGCAGTGGGC AGCATCTCAG |
| | CTACTGCAGC CTCCGCCTCC CGTGCTCAAG CGATCCTCCC |
| | ACGTCAGCCT CCCAAGAAGG TGGTATTATT GGCCACGCCT |
| | GGCCAATTTT TGTATTTTTT GTAGAGAGGA GGTCTCACTG |
| | TGTTGCCCAG GCTGTTCTTG TACTCCTGAG CTCCAGCAAT |
| | CCACCCGCCT TGGCCTCTGA AAGCGCTGGG ATTACAGGCT |
| | TGAGGCACCG TGCCCAGCTG AGCCAGGCTT TTAAAACCGG |
| | TTCTGTCCCT ACCCAGAGAG CTTCTTACCT GGCGGCCTCC |
| | TTAACCTCTG ACACCAGCTG ACCACGCTTA TGAGCCAAAC |
| | ATAAAAACCA AAAGAAACCC AGGCTTGGTG GCTCACGCCT |
| | GTAATCCCAG CACTTTGGGA |
| 20047 | tatccac cagccttggc ctcccaaagt gctaggatta |
| | caggcatgag ccaccacgca tggcctgtct |
| | tttcttcttg gtcattttcg ctaaaggttt gtcaattttg |
| | ttgatctttt ttgttgctga tctctattgt |
| | tttcccattc tgtttcattt atttccattt taacctttgt |
| | ttcctttttt ctgctggttt gggtttaatt tgctcttttt |
| | ttcccctaat tttTCAAGGT ATACAGTTAA GTTATTGATT |
| | TGAGATCTCT TTTTTCTTtt cttttttttt tttttttttt |
| | ttttttggtt gctgttgaga |
| | tggagtctcc ctctgtcacc cagactggag tgcagtggca |
| | tgatctcagc tcactgcagc |
| | ctccgccgcc caggcgattc tcctgcctca gcctcctgag |
| | tagACGTTTC |
| | CCGGCCAagg tgtttctttt tgaatgtaag catttacagc |
| | tacagatttc cctctaaaca |
| | ctgctttcac tgc D ttccataaga ttgttttttg |
| | ttgttgtttt gttgtttgag acacagtctc |
| | actctgttgc cgtttggaga gcagcgatgc gatcatagct |
| | ctgtagcctt gagctcctgg |
| | actcaatcag tcctcctgcc tcagcctccc aagtagctgg |
| | gactacaggt gtacaccact |
| | gcacctaact aatttctttt ataagttttt gcagaggcca |
| | ggcacagtgg ctcacacctg taatcccagc |
| | actttgggag gccaaggtgg gtggatcacc taaggtcagg |
| | agttcgagac cagcctggcc |
| | gacagggaga aaccccatct ctactaaaaa tacaaaaatt |
| | agctgggcgt ggtggcaggt |
| | gcctgtaatc ccagctactc aggaggctga ggcaggagaa |
| | tcgcttgaac ctgggaggca |
| | gaggttgcag tgagccagga tcacaccatt gcactccagc |
| | ctgggtaaca aaagcaaaac |
| | tccatctcaa gaaaagaaaa |
| 20048 | CATCTGGCTACCTCGGCCTCCCAAAGTGCTGGGATTACAGGCGT |
| | GAGCCACCAAGCCCAGCCTAACGTTACATTTCTTTCTTTCTTTTT |
| | CTTTCCTTTTTTTTTTTTTTGAGACAGACTCTCACTCTGCTGCCC |
| | AGGCTGGAGTGCAGTGGCATGATCTTGTCTCACTACAACCTCTG |
| | TCTCCCAGGTTCAAGCAATTCTCGTGCCTCAGCCTCCCCAGTAG |
| | CTAGGATTACAGGCACCCACCACCACCCCCAGCTAACTTTTTAT |
| | ATTATTAGTAGAGACAGGGTTTCACCATGTTGGCTGGGCTGGTC |
| | TTGAACTCCTGACCTGAAGTGATCCACCCTCCTCAGGCTTCCAA |
| | AGTGCTGGGATTACAGGCATGAGCCATGGTGCCCGGCTATATTT |
| | CTAAGTTTATTTTGCTTCATATACCAGGAACCGTAGTTTGTTTCA |
| | CATGTGGTCTTGAAAATAGTTTGTTCTGTTCTGATTATAAGTAA |
| | CATGTGTTTATTGNTTTTTTTTAAAAAAGGGTAAATATCCAGGT |
| | GCAGTGGCATGTGCTTGTAGTCCCAGCTACTCAGGAGGCTGAG |
| | GCCGGAGGAAGCTTTTGAGCCCAGGCATTTGAGACTGTAGTGA |
| | GCTGTGATTGTTCCACTGCATTCTAACCTGGGTGATAGAGCAAG |
| | ACCCTGTCTCAAAAATAAAATACAATTAAATTAAATTTAAAAAT |
| | TAAAAAATTGATAAATATAGAAAAAATGTGAAAACCAAAGGG |
| | GAACGCCTCCCACTACCAGAGATCATTTCTATTTTCATTCTGGA |
| | GAATTTCCTTCTAGTTTTTTTTTAAAACGCATAAATATGGGAAA |
| | TACACAATTATGGGAAATATACAACTTCCCATAATGAGTTAACA |
| | CACCATTTACGATTTTGTGTCCTGCTAGTCTGTCATTATGTCATT |
| | AGCGTTTATCCCTTGCATAAAATGCTTCTCAGATTACTAAATGG |
| | CAACATACTATAATATTGAACTTTGTGGATATC |
| 20050 | MAEDLGLSFGETASVEMLPEHGSCRPKARSSSARWALTCCLVLLP |
| >sp\|O95150\| | FLAGLTTYLLVSQLRAQGEACVQFQALKGQEFAPSHQQVYAPLRA |
| TNF15_HUMAN | DGDKPRAHLTVVRQTPTQHFKNQFPALHWEHELGLAFTKNRMNY |
| Tumor | TNKFLLIPESGDYFIYSQVTFRGMTSECSEIRQAGRPNKPDSITV |
| necrosis | VITKVTDSYPEPTQLLMGTKSVCEVGSNWFQPIYLGAMFSLQEGD |
| factor | KLMVNVSDISLVDYTKEDKTFFGAFLL |
| ligand | |
| superfamily | |
| member 15 | |
| OS = | |
| Homo sapiens | |
| OX = 9606 | |
| GN = | |
| TNFSF15 | |
| PE = 1 | |
| SV = 2 | |
| 20051 | MQLTKGRLHFSHPLSHTKHISPFVTDAPLRADGDKPRAHLTVVRQ |
| >sp\|O95150- | TPTQHFKNQFPALHWEHELGLAFTKNRMNYTNKFLLIPESGDYFI |
| 2\| | YSQVTFRGMTSECSEIRQAGRPNKPDSITVVITKVTDSYPEPTQL |
| TNF15_HUMAN | LMGTKSVCEVGSNWFQPIYLGAMFSLQEGDKLMVNVSDISLVDYT |
| Isoform 2 | KEDKTFFGAFLL |
| of Tumor | |
| necrosis | |
| factor | |
| ligand | |
| superfamily | |
| member 15 | |
| OS = | |
| Homo sapiens | |
| OX = 9606 | |
| GN = | |
| TNFSF15 | |
| 20052 | MRRFLSKVYSFPMRKLILFLVFPVVRQTPTQHFKNQFPALHWEHE |
| >sp\|O95150- | LGLAFTKNRMNYTNKFLLIPESGDYFIYSQVTFRGMTSECSEIRQ |
| 3\| | AGRPNKPDSITVVITKVTDSYPEPTQLLMGTKSVCEVGSNWFQPI |
| TNF15_HUMAN | YLGAMFSLQEGDKLMVNVSDISLVDYTKEDKTFFGAFLL |
| Isoform 3 | |
| of Tumor | |
| necrosis | |
| factor | |
| ligand | |
| superfamily | |
| member 15 | |
| OS = | |
| Homo sapiens | |
| OX = 9606 | |
| GN = | |
| TNFSF15 | |
| 20053 | MFCSTSAVNSCARCFFHSVCPAGMIVKFPGTAQKNTVCEPASPGV |
| tumor | SPACASPENCKEPSSGTIPQAKPTPVSPATSSASTMPVRGGTRLA |
| necrosis | QEAASKLTRAPDSPSSVGRPSSDPGLSPTQPCPEGSGDCRKQCEP |
| factor | DYYLDEAGRCTACVSCSRDDLVEKTPCAWNSSRTCECRPGMICAT |
| receptor | SATNSCARCVPYPICAAETVTKPQDMAEKDTTFEAPPLGTQPDCN |
| superfamily | PTPENGEAPASTSPTQSLLVDSQASKTLPIPTSAPVALSSTGKPV |
| member 8 | LDAGPVLFWVILVLVVVVGSSAFLLCHRRACRKRIRQKLHLCYPV |
| isoform 3 | QTSQPKLELVDSRPRRSSTLRSGASVTEPVAEERGLMSQPLMETC |
| (NP_ | HSVGAAYLESLPLQDASPAGGPSSPRDLPEPRVSTEHTNNKIEKI |
| 001268359.2) | YIMKADTVIVGTVKAELPEGRGLAGPAEPELEEELEADHTPHYPE |
| | QETEPPLGSCSDVMLSVEEEGKEDPLPTAASGK |
| 20054 | MRVLLAALGLLFLGALRAFPQDRPFEDTCHGNPSHYYDKAVRRC |
| tumor | CYRCPMGLFPTQQCPQRPTDCRKQCEPDYYLDEADRCTACVTCSR |
| necrosis | DDLVEKTPCAWNSSRVCECRPGMFCSTSAVNSCARCFFHSVCPAG |
| factor | MIVKFPGTAQKNTVCEPASPGVSPACASPENCKEPSSGTIPQAKP |
| receptor | TPVSPATSSASTMPVRGGTRLAQEAASKLTRAPDSPSSVGRPSSD |
| superfamily | PGLSPTQPCPEGSGDCRKQCEPDYYLDEAGRCTACVSCSRDDLVE |
| member 8 | KTPCAWNSSRTCECRPGMICATSATNSCARCVPYPICAAETVTKP |
| isoform 1 | QDMAEKDTTFEAPPLGTQPDCNPTPENGEAPASTSPTQSLLVDSQ |
| precursor | ASKTLPIPTSAPVALSSTGKPVLDAGPVLFWVILVLVVVVGSSAF |
| (NP_001234.3) | LLCHRRACRKRIRQKLHLCYPVQTSQPKLELVDSRPRRSSTQLRS |
| | GASVTEPVAEERGLMSQPLMETCHSVGAAYLESLPLQDASPAGGP |
| | SSPRDLPEPRVSTEHTNNKIEKIYIMKADTVIVGTVKAELPEGRG |
| | LAGPAEPELEEELEADHTPHYPEQETEPPLGSCSDVMLSVEEEGK |
| | EDPLPTAASGK |
| 20055 | QVQLVQSGAEVKKPGASVKVSCKVSGYTFTDYYITWVRQAPGQA |
| heavy | LEWMGWIYPGSGNTKYSQKFQGRFVFSVDTSASTAYLQISSLKAE |
| chain | DTAVYYCANYGNYWFAYWGQGTLVTVS |
| variable | |
| region | |
| (CD30L) | |
| 20056 | EIVLTQSPDSLAVSLGERATINCKASQSVDFDGDSYLNWYQQKPG |
| light | QPPKVLIYAASTLQSGVPSRFSGSGSGTDFTLTINSLEAEDAATY |
| chain | YCQQSNEDPWTFGGGTKVEIK |
| variable | |
| region | |
| (CD30L) | |
| 20057 | TCCTTATTCCTGGCTCTTCCAGAGGCTGGTGGCTCTTAGGGCTC |
| | AGCAGGGCTGCTGCCTGGGACAGGGAGACCAGGGGACCCAGG |
| | AAGCCCTGGCTCAGAGGAACTGCATTCTGCCCGCAACAAAGAC |
| | GGAGTCAAACAAGAACTCCGGAGTTTGCAGAAGTGTTTCCCTTT |
| | AAGGAAACGCTTCTATCCTGTGCAGCAACCTAGGTTTAGGGTCC |
| | AACTGTCTCCAAAGGACCACTTGAGAAGCAAGAAGGAGCCTGG |
| | TGAGGCTGCTCCCAGTGCCCTGCGGCCAGCAGTCCACACAGCC |
| | GGAGAGCCCATCTCTGAGCTGGGCGCCCCATGGCAAAGCACCC |
| | CCTGAACTTACCAGCTCGAAGGCTGCTGAAGAGCAGGAAGAGC |
| | AGTCCAGGACTGGAAAAAACAACCAGAAAGGCAGGTGAGGCG |
| | GGGCCACCAGGGAGTTACCTGTATCTTCCAAACAGGAACAGGC |
| | TGGTTCCCATGAGCAGGAGGTAGTTANGCCCATCACAGAAATG |
| | TGAAGGCAGAGCCAGGAGCCTGCCTGCCTCTGTTCTCCATGGG |
| | AATTCGGGGTC |
| | CGGGGCCAGGACCACCACCCTCCTGCCCAGCACAGCAAGTCCG |
| | AGGGGCTGGCAGCCTCTCACCACTCTCTAGCTCTCGCGGTAACA |
| | AATCCCCAGAAACACAGTGATGCTGGCGTGAGGATGAAGGGGA |
| | GCGAGGGACGCCAGTGAGGCTGGTCTAGCCTTCCTGGGGACAG |
| | ATGCCAAGAAGTTGTAGGAAATCAGAAAAAAAAAAAAAAAAA |
| | AAAGCTTTCAGGGCACATATAGTAGGAGTGTCACTTAAAATGC |
| | TGGGGAGACGGAGAACATCAGGCGTGCCCGTGACAGGGTCAGG |
| | TGAGTGACGGGACAGCCCTGTGCGGAACGCGGATCATTTTGAA |
| | ACCAAACCTGAGCTCCTCCTGTTTCAGATCCTGCTGCAGCTGGT |
| | GCCCCTGCCTCGGGCAGCAAATTCCCCTCGTGACTCCAATGC |
| 20058 | TCTGGCTGCCGACAGTCAGGTTCTGCTGCAGAAGCACGTTCTCT |
| | ATGCAGCAGCCAATGTTCACGCTGGGGGTCCGTGCGATCCTCA |
| | GCACGCTGACCACGTCATACAAGCCCCGCATGTTCAAGAAGAC |
| | GGTGTCATTCTGCAGAGCCTGGTCCAGCAGGCTGTTGTCCGTCT |
| | TATTGATCCAGTACACGTTGGGCCTGGGGTAGCCGTTTATGGAT |
| | GTACACGTGAAGGTGAGCTCATCCTGGGAGGGGCTGTGGGGGG |
| | CGCTGACGACGGGCACGCTGAAGTTTGCTGCAGGGGAGGGAAA |
| | CAGATTGTGAGAGATGCCAGACCCTGCTGGTCAAGAAACAGAG |
| | GGTACACGGTGCCAAGGCTGGGTCAGAGGGGAGGCGGCCCATT |
| | GTGCCCCGACATGGGTGACAGGCCAGGACC |
| | AGGGCTGTGGTCCGAGCAGCAGGCTCCGCCCTGTCCTGCCCAA |
| | GAGTCATCCCCCAAGCCAGTCCCAGTAGCCAGGGACCNCTGAG |
| | CCTGTCGGGCAGTGACTGGCACCCACAGACCCCCCACTCCACA |
| | GCCGTCGGCTGTGCCGGGACCCCCTCATTTGGATCTGGTCATTC |
| | TCACTGCTGACACAGGGGCTCACAGTCCATCTGAAATGGACAC |
| | AGCTGTTCTCCCCAATGAACTGCCCAGAGCTCCTTGGTTGCCTC |
| | TTATTTTTCTCTTAAATTTTGTTCTCATTTAGTGCTTTATAGAGT |
| | TCCCTTCAAATTTCACTTTTAAAACTCTAGTTTGGATGTGGTGGC |
| | TCACGCCTGTAATCACAGCACTTTGGGAGGGTGAGGCAGGAGGA |
| | TCGCTTGTGTCCAGGAGTTTGAGACCAGCCTGGGCAACATAGTG |
| | AGACCCCATTTCTACAAATAATCAAAATTAGCCAGGCGAGGTG |
| | GCATGTGCCTGTAGTCCCAGATACTCAGGAGGCTGAAGCAGGA |
| | GAATTGCTTGAGCTCAGGAGGTCAAGGCTGCAGCGTGATCACG |
| | CTACTGCACTCCAG |
| 20059 | AGAATTTCTCAGCAATTACATTATATTGCTGCTCACTTGCAGTA |
| | GGAAAGCTGTCACAAATGTGGCAGACACAGGGTAGCTTTACTG |
| | TTTGTGCAGCTACGTAAATGCCTGTGGGAAAATCTTTTTTTTTG |
| | AGATGGAGTCTTGCTCCGTCACCCAGGCTGGGGTGCAATGGCG |
| | TGATCTCAGCTCACTGCAACCCCCGACTCTGGGGTTCACGCCAT |
| | TCTCCTGCCTCACCCTCCCAAGTAGCTGGGATTACAGGTGCCCG |
| | CCACCATGCCCAGCTAATTTTTTGTATTTTTAGTAGAGATCGGG |
| | CTTCACTATGTTGGCCAGCCTGGTCTCGAACTCCTGACCTCAGG |
| | TGATCCACCCGCCTTGGCCTCCCAAAGTCCTGGGATTACAGGAG |
| | TGAGCCACTGCACCTGGCACCTGCAGGAAAATCTGTGTGTGTCC |
| | CCTGCCCCCAAAGCCCTCTGGGCTGGAAGGCTTGGCAAGGTTTC |
| | AGGTTTGTGCTGCGGTGCNTCGTCCTTATTCCTGGCTCTTCCAG |
| | AGGCTGGTGGCTCTTAGGGCTCAGCAGGGCTGCTGCCTGGGAC |
| | AGGGAGACCAGGGGACCCAGGAAGCCCTGGCTCAGAGGAACT |
| | GCATTCTGCCCGCAACAAAGACGGAGTCAAACAAGAACTCCGG |
| | AGTTTGCAGAAGTGTTTCCCTTTAAGGAAACGCTTCTATCCTGT |
| | GCAGCAACCTAGGTTTAGGGTCCAACTGTCTCCAAAGGACCAC |
| | TTGAGAAGCAAGAAGGAGCCTGGTGAGGCTGCTCCCAGTGCCC |
| | TGCGGCCAGCAGTCCACACAGCCGGAGAGCCCATCTCTGAGCT |
| | GGGCGCCCCATGGCAAAGCACCCCCTGAACTTACCAGCTCGAA |
| | GGCTGCTGAAGAGCAGGAAGAGCAGTCCAGGACTGGAAAAAA |
| | CAACCAGAAAGGCAGGTGAGGCGGGGCCACCAGGGAGTTACCT |
| | GTATCTTCCAAACAGGAACAGGCTGGTTCCCATGAGCAGGAGG |
| | TAG |

### Example 19: Validation of an 8-SNP Model for TL1A Companion Diagnostics

[1751] The machine learning workflow identified several SNP model combinations for the development of the TL1A companion diagnostic (TL1A CDx). Previous analyses had identified 3-SNP combination models composed of variants associated with TNFSF15 (rs6478109), ICOSLG (rs7278257, rs2070557), ETS1 (rs7935393), and RBFOX1 (rs9806914) genes as well as variant rs1892231. Next, 8-SNP models were investigated to identify novel combinations with improved positive predictive value (PPV), as well as negative predictive value (NPV).

[1752] 8-SNP models were identified using the methods described above via a Cedars Sinai Crohn's Disease cohort. These additional SNP models (Models 1-Model 495) consisted of 8-SNP combinations of the following SNPs: TNFSF15 (rs6478109), ICOSLG (rs56124762), ETS1 (rs7935393), RBFOX1 (rs9806914), C14orfl 77 (rs1892231), CTNND2 (rs16901748), CT, EC16A (rs12934476), RTEL1-TNFRSF6B (rs2297437), (LINC01031) rs1326860, P1PN2 (rs12457255), RGS7 (rs2815844), JAK2 (rs10974900), XKR6 (rs2409750), RBM17 (rs1541020), ENOX1 (rs4942248), and PRDM1 (rs7759385). Table 25 provides, in accordance with the embodiments disclosed herein, the 8-SNP model combinations.

TABLE 25
8-SNP Models

| | |
|---|---|
| Model_1 | rs6478109, rs56124762, rs1892231, rs16901748, |
| | rs12934476, rs7935393, rs9806914, rs2297437 |
| Model_2 | rs6478109, rs56124762, rs1892231, rs16901748, |
| | rs12934476, rs7935393, rs9806914, rs1326860 |
| Model_3 | rs6478109, rs56124762, rs1892231, rs16901748, |
| | rs12934476, rs7935393, rs9806914, rs12457255 |
| Model_4 | rs6478109, rs56124762, rs1892231, rs16901748, |
| | rs12934476, rs7935393, rs9806914, rs2815844 |
| Model_5 | rs6478109, rs56124762, rs1892231, rs16901748, |
| | rs12934476, rs7935393, rs9806914, rs10974900 |
| Model_6 | rs6478109, rs56124762, rs1892231, rs16901748, |
| | rs12934476, rs7935393, rs9806914, rs2409750 |
| Model_7 | rs6478109, rs56124762, rs1892231, rs16901748, |
| | rs12934476, rs7935393, rs9806914, rs1541020 |
| Model_8 | rs6478109, rs56124762, rs1892231, rs16901748, |
| | rs12934476, rs7935393, rs9806914, rs4942248 |
| Model_9 | rs6478109, rs56124762, rs1892231, rs16901748, |
| | rs12934476, rs7935393, rs9806914, rs7759385 |
| Model_10 | rs6478109, rs56124762, rs1892231, rs16901748, |
| | rs12934476, rs7935393, rs2297437, rs1326860 |
| Model_11 | rs6478109, rs56124762, rs1892231, rs16901748, |
| | rs12934476, rs7935393, rs2297437, rs12457255 |
| Model_12 | rs6478109, rs56124762, rs1892231, rs16901748, |
| | rs12934476, rs7935393, rs2297437, rs2815844 |
| Model_13 | rs6478109, rs56124762, rs1892231, rs16901748, |
| | rs12934476, rs7935393, rs2297437, rs10974900 |
| Model_14 | rs6478109, rs56124762, rs1892231, rs16901748, |
| | rs12934476, rs7935393, rs2297437, rs2409750 |
| Model_15 | rs6478109, rs56124762, rs1892231, rs16901748, |
| | rs12934476, rs7935393, rs2297437, rs1541020 |
| Model_16 | rs6478109, rs56124762, rs1892231, rs16901748, |
| | rs12934476, rs7935393, rs2297437, rs4942248 |
| Model_17 | rs6478109, rs56124762, rs1892231, rs16901748, |
| | rs12934476, rs7935393, rs2297437, rs7759385 |
| Model_18 | rs6478109, rs56124762, rs1892231, rs16901748, |
| | rs12934476, rs7935393, rs1326860, rs12457255 |
| Model_19 | rs6478109, rs56124762, rs1892231, rs16901748, |
| | rs12934476, rs7935393, rs1326860, rs2815844 |
| Model_20 | rs6478109, rs56124762, rs1892231, rs16901748, |
| | rs12934476, rs7935393, rs1326860, rs10974900 |
| Model_21 | rs6478109, rs56124762, rs1892231, rs16901748, |
| | rs12934476, rs7935393, rs1326860, rs2409750 |
| Model_22 | rs6478109, rs56124762, rs1892231, rs16901748, |
| | rs12934476, rs7935393, rs1326860, rs1541020 |
| Model_23 | rs6478109, rs56124762, rs1892231, rs16901748, |
| | rs12934476, rs7935393, rs1326860, rs4942248 |
| Model_24 | rs6478109, rs56124762, rs1892231, rs16901748, |
| | rs12934476, rs7935393, rs1326860, rs7759385 |
| Model_25 | rs6478109, rs56124762, rs1892231, rs16901748, |
| | rs12934476, rs7935393, rs12457255, rs2815844 |
| Model_26 | rs6478109, rs56124762, rs1892231, rs16901748, |
| | rs12934476, rs7935393, rs12457255, rs10974900 |
| Model_27 | rs6478109, rs56124762, rs1892231, rs16901748, |
| | rs12934476, rs7935393, rs12457255, rs2409750 |
| Model_28 | rs6478109, rs56124762, rs1892231, rs16901748, |
| | rs12934476, rs7935393, rs12457255, rs1541020 |
| Model_29 | rs6478109, rs56124762, rs1892231, rs16901748, |
| | rs12934476, rs7935393, rs12457255, rs4942248 |
| Model_30 | rs6478109, rs56124762, rs1892231, rs16901748, |
| | rs12934476, rs7935393, rs12457255, rs7759385 |
| Model_31 | rs6478109, rs56124762, rs1892231, rs16901748, |
| | rs12934476, rs7935393, rs2815844, rs10974900 |
| Model_32 | rs6478109, rs56124762, rs1892231, rs16901748, |
| | rs12934476, rs7935393, rs2815844, rs2409750 |
| Model_33 | rs6478109, rs56124762, rs1892231, rs16901748, |
| | rs12934476, rs7935393, rs2815844, rs1541020 |
| Model_34 | rs6478109, rs56124762, rs1892231, rs16901748, |
| | rs12934476, rs7935393, rs2815844, rs4942248 |
| Model_35 | rs6478109, rs56124762, rs1892231, rs16901748, |
| | rs12934476, rs7935393, rs2815844, rs7759385 |
| Model_36 | rs6478109, rs56124762, rs1892231, rs16901748, |
| | rs12934476, rs7935393, rs10974900, rs2409750 |
| Model_37 | rs6478109, rs56124762, rs1892231, rs16901748, |
| | rs12934476, rs7935393, rs10974900, rs1541020 |
| Model_38 | rs6478109, rs56124762, rs1892231, rs16901748, |
| | rs12934476, rs7935393, rs10974900, rs4942248 |
| Model_39 | rs6478109, rs56124762, rs1892231, rs16901748, |
| | rs12934476, rs7935393, rs10974900, rs7759385 |
| Model_40 | rs6478109, rs56124762, rs1892231, rs16901748, |
| | rs12934476, rs7935393, rs2409750, rs1541020 |
| Model_41 | rs6478109, rs56124762, rs1892231, rs16901748, |
| | rs12934476, rs7935393, rs2409750, rs4942248 |
| Model_42 | rs6478109, rs56124762, rs1892231, rs16901748, |
| | rs12934476, rs7935393, rs2409750, rs7759385 |
| Model_43 | rs6478109, rs56124762, rs1892231, rs16901748, |
| | rs12934476, rs7935393, rs1541020, rs4942248 |
| Model_44 | rs6478109, rs56124762, rs1892231, rs16901748, |
| | rs12934476, rs7935393, rs1541020, rs7759385 |
| Model_45 | rs6478109, rs56124762, rs1892231, rs16901748, |
| | rs12934476, rs7935393, rs4942248, rs7759385 |
| Model_46 | rs6478109, rs56124762, rs1892231, rs16901748, |
| | rs12934476, rs9806914, rs2297437, rs1326860 |
| Model_47 | rs6478109, rs56124762, rs1892231, rs16901748, |
| | rs12934476, rs9806914, rs2297437, rs12457255 |
| Model_48 | rs6478109, rs56124762, rs1892231, rs16901748, |
| | rs12934476, rs9806914, rs2297437, rs2815844 |
| Model_49 | rs6478109, rs56124762, rs1892231, rs16901748, |
| | rs12934476, rs9806914, rs2297437, rs10974900 |
| Model_50 | rs6478109, rs56124762, rs1892231, rs16901748, |
| | rs12934476, rs9806914, rs2297437, rs2409750 |
| Model_51 | rs6478109, rs56124762, rs1892231, rs16901748, |
| | rs12934476, rs9806914, rs2297437, rs1541020 |
| Model_52 | rs6478109, rs56124762, rs1892231, rs16901748, |
| | rs12934476, rs9806914, rs2297437, rs4942248 |
| Model_53 | rs6478109, rs56124762, rs1892231, rs16901748, |
| | rs12934476, rs9806914, rs2297437, rs7759385 |
| Model_54 | rs6478109, rs56124762, rs1892231, rs16901748, |
| | rs12934476, rs9806914, rs1326860, rs12457255 |
| Model_55 | rs6478109, rs56124762, rs1892231, rs16901748, |
| | rs12934476, rs9806914, rs1326860, rs2815844 |
| Model_56 | rs6478109, rs56124762, rs1892231, rs16901748, |
| | rs12934476, rs9806914, rs1326860, rs10974900 |
| Model_57 | rs6478109, rs56124762, rs1892231, rs16901748, |
| | rs12934476, rs9806914, rs1326860, rs2409750 |
| Model_58 | rs6478109, rs56124762, rs1892231, rs16901748, |
| | rs12934476, rs9806914, rs1326860, rs1541020 |
| Model_59 | rs6478109, rs56124762, rs1892231, rs16901748, |
| | rs12934476, rs9806914, rs1326860, rs4942248 |
| Model_60 | rs6478109, rs56124762, rs1892231, rs16901748, |
| | rs12934476, rs9806914, rs1326860, rs7759385 |
| Model_61 | rs6478109, rs56124762, rs1892231, rs16901748, |
| | rs12934476, rs9806914, rs12457255, rs2815844 |
| Model_62 | rs6478109, rs56124762, rs1892231, rs16901748, |
| | rs12934476, rs9806914, rs12457255, rs10974900 |
| Model_63 | rs6478109, rs56124762, rs1892231, rs16901748, |
| | rs12934476, rs9806914, rs12457255, rs2409750 |
| Model_64 | rs6478109, rs56124762, rs1892231, rs16901748, |
| | rs12934476, rs9806914, rs12457255, rs1541020 |
| Model_65 | rs6478109, rs56124762, rs1892231, rs16901748, |
| | rs12934476, rs9806914, rs12457255, rs4942248 |
| Model_66 | rs6478109, rs56124762, rs1892231, rs16901748, |
| | rs12934476, rs9806914, rs12457255, rs7759385 |
| Model_67 | rs6478109, rs56124762, rs1892231, rs16901748, |
| | rs12934476, rs9806914, rs2815844, rs10974900 |
| Model_68 | rs6478109, rs56124762, rs1892231, rs16901748, |
| | rs12934476, rs9806914, rs2815844, rs2409750 |
| Model_69 | rs6478109, rs56124762, rs1892231, rs16901748, |
| | rs12934476, rs9806914, rs2815844, rs1541020 |
| Model_70 | rs6478109, rs56124762, rs1892231, rs16901748, |
| | rs12934476, rs9806914, rs2815844, rs4942248 |
| Model_71 | rs6478109, rs56124762, rs1892231, rs16901748, |
| | rs12934476, rs9806914, rs2815844, rs7759385 |
| Model_72 | rs6478109, rs56124762, rs1892231, rs16901748, |
| | rs12934476, rs9806914, rs10974900, rs2409750 |
| Model_73 | rs6478109, rs56124762, rs1892231, rs16901748, |
| | rs12934476, rs9806914, rs10974900, rs1541020 |
| Model_74 | rs6478109, rs56124762, rs192231, rs16901748, |
| | rs12934476, rs9806914, rs10974900, rs4942248 |
| Model_75 | rs6478109, rs56124762, rs1892231, rs16901748, |
| | rs12934476, rs9806914, rs10974900, rs7759385 |
| Model_76 | rs6478109, rs56124762, rs1892231, rs16901748, |
| | rs12934476, rs9806914, rs2409750, rs1541020 |
| Model_77 | rs6478109, rs56124762, rs1892231, rs16901748, |
| | rs12934476, rs9806914, rs2409750, rs4942248 |
| Model_78 | rs6478109, rs56124762, rs1892231, rs16901748, |
| | rs12934476, rs9806914, rs2409750, rs7759385 |
| Model_79 | rs6478109, rs56124762, rs1892231, rs16901748, |
| | rs12934476, rs9806914, rs1541020, rs4942248 |
| Model_80 | rs6478109, rs56124762, rs1892231, rs16901748, |
| | rs12934476, rs9806914, rs1541020, rs7759385 |
| Model_81 | rs6478109, rs56124762, rs1892231, rs16901748, |
| | rs12934476, rs9806914, rs4942248, rs7759385 |
| Model_82 | rs6478109, rs56124762, rs1892231, rs16901748, |
| | rs12934476, rs2297437, rs1326860, rs12457255 |
| Model_83 | rs6478109, rs56124762, rs1892231, rs16901748, |
| | rs12934476, rs2297437, rs1326860, rs2815844 |
| Model_84 | rs6478109, rs56124762, rs1892231, rs16901748, |
| | rs12934476, rs2297437, rs1326860, rs10974900 |
| Model_85 | rs6478109, rs56124762, rs1892231, rs16901748, |
| | rs12934476, rs2297437, rs1326860, rs2409750 |
| Model_86 | rs6478109, rs56124762, rs1892231, rs16901748, |
| | rs12934476, rs2297437, rs1326860, rs1541020 |
| Model_87 | rs6478109, rs56124762, rs1892231, rs16901748, |
| | rs12934476, rs2297437, rs1326860, rs4942248 |
| Model_88 | rs6478109, rs56124762, rs1892231, rs16901748, |
| | rs12934476, rs2297437, rs1326860, rs7759385 |
| Model_89 | rs6478109, rs56124762, rs1892231, rs16901748, |
| | rs12934476, rs2297437, rs12457255, rs2815844 |
| Model_90 | rs6478109, rs56124762, rs1892231, rs16901748, |
| | rs12934476, rs2297437, rs12457255, rs10974900 |
| Model_91 | rs6478109, rs56124762, rs1892231, rs16901748, |
| | rs12934476, rs2297437, rs12457255, rs2409750 |
| Model_92 | rs6478109, rs56124762, rs1892231, rs16901748, |
| | rs12934476, rs2297437, rs12457255, rs1541020 |
| Model_93 | rs6478109, rs56124762, rs1892231, rs16901748, |
| | rs12934476, rs2297437, rs12457255, rs4942248 |
| Model_94 | rs6478109, rs56124762, rs1892231, rs16901748, |
| | rs12934476, rs2297437, rs12457255, rs7759385 |
| Model_95 | rs6478109, rs56124762, rs1892231, rs16901748, |
| | rs12934476, rs2297437, rs2815844, rs10974900 |
| Model_96 | rs6478109, rs56124762, rs1892231, rs16901748, |
| | rs12934476, rs2297437, rs2815844, rs2409750 |
| Model_97 | rs6478109, rs56124762, rs1892231, rs16901748, |
| | rs12934476, rs2297437, rs2815844, rs1541020 |
| Model_98 | rs6478109, rs56124762, rs1892231, rs16901748, |
| | rs12934476, rs2297437, rs2815844, rs4942248 |
| Model_99 | rs6478109, rs56124762, rs1892231, rs16901748, |
| | rs12934476, rs2297437, rs2815844, rs7759385 |
| Model_100 | rs6478109, rs56124762, rs1892231, rs16901748, |
| | rs12934476, rs2297437, rs10974900, rs2409750 |
| Model_101 | rs6478109, rs56124762, rs1892231, rs16901748, |
| | rs12934476, rs2297437, rs10974900, rs1541020 |
| Model_102 | rs6478109, rs56124762, rs1892231, rs16901748, |
| | rs12934476, rs2297437, rs10974900, rs4942248 |
| Model_103 | rs6478109, rs56124762, rs1892231, rs16901748, |
| | rs12934476, rs2297437, rs10974900, rs7759385 |
| Model_104 | rs6478109, rs56124762, rs1892231, rs16901748, |
| | rs12934476, rs2297437, rs2409750, rs1541020 |
| Model_105 | rs6478109, rs56124762, rs1892231, rs16901748, |
| | rs12934476, rs2297437, rs2409750, rs4942248 |
| Model_106 | rs6478109, rs56124762, rs1892231, rs16901748, |
| | rs12934476, rs2297437, rs2409750, rs7759385 |
| Model_107 | rs6478109, rs56124762, rs1892231, rs16901748, |
| | rs12934476, rs2297437, rs1541020, rs4942248 |
| Model_108 | rs6478109, rs56124762, rs1892231, rs16901748, |
| | rs12934476, rs2297437, rs1541020, rs7759385 |
| Model_109 | rs6478109, rs56124762, rs1892231, rs16901748, |
| | rs12934476, rs2297437, rs4942248, rs7759385 |
| Model_110 | rs6478109, rs56124762, rs1892231, rs16901748, |
| | rs12934476, rs1326860, rs12457255, rs2815844 |
| Model_111 | rs6478109, rs56124762, rs1892231, rs16901748, |
| | rs12934476, rs1326860, rs12457255, rs10974900 |
| Model_112 | rs6478109, rs56124762, rs1892231, rs16901748, |
| | rs12934476, rs1326860, rs12457255, rs2409750 |
| Model_113 | rs6478109, rs56124762, rs1892231, rs16901748, |
| | rs12934476, rs1326860, rs12457255, rs1541020 |
| Model_114 | rs6478109, rs56124762, rs1892231, rs16901748, |
| | rs12934476, rs1326860, rs12457255, rs4942248 |
| Model_115 | rs6478109, rs56124762, rs1892231, rs16901748, |
| | rs12934476, rs1326860, rs12457255, rs7759385 |
| Model_116 | rs6478109, rs56124762, rs1892231, rs16901748, |
| | rs12934476, rs1326860, rs2815844, rs10974900 |
| Model_117 | rs6478109, rs56124762, rs1892231, rs16901748, |
| | rs12934476, rs1326860, rs2815844, rs2409750 |
| Model_118 | rs6478109, rs56124762, rs1892231, rs16901748, |
| | rs12934476, rs1326860, rs2815844, rs1541020 |
| Model_119 | rs6478109, rs56124762, rs1892231, rs16901748, |
| | rs12934476, rs1326860, rs2815844, rs4942248 |
| Model_120 | rs6478109, rs56124762, rs1892231, rs16901748, |
| | rs12934476, rs1326860, rs2815844, rs7759385 |
| Model_121 | rs6478109, rs56124762, rs1892231, rs16901748, |
| | rs12934476, rs1326860, rs10974900, rs2409750 |
| Model_122 | rs6478109, rs56124762, rs1892231, rs16901748, |
| | rs12934476, rs1326860, rs10974900, rs1541020 |
| Model_123 | rs6478109, rs56124762, rs1892231, rs16901748, |
| | rs12934476, rs1326860, rs10974900, rs4942248 |
| Model_124 | rs6478109, rs56124762, rs1892231, rs16901748, |
| | rs12934476, rs1326860, rs10974900, rs7759385 |
| Model_125 | rs6478109, rs56124762, rs1892231, rs16901748, |
| | rs12934476, rs1326860, rs2409750, rs1541020 |
| Model_126 | rs6478109, rs56124762, rs1892231, rs16901748, |
| | rs12934476, rs1326860, rs2409750, rs4942248 |
| Model_127 | rs6478109, rs56124762, rs1892231, rs16901748, |
| | rs12934476, rs1326860, rs2409750, rs7759385 |
| Model_128 | rs6478109, rs56124762, rs1892231, rs16901748, |
| | rs12934476, rs1326860, rs1541020, rs4942248 |
| Model_129 | rs6478109, rs56124762, rs1892231, rs16901748, |
| | rs12934476, rs1326860, rs1541020, rs7759385 |
| Model_130 | rs6478109, rs56124762, rs1892231, rs16901748, |
| | rs12934476, rs1326860, rs4942248, rs7759385 |
| Model_131 | rs6478109, rs56124762, rs1892231, rs16901748, |
| | rs12934476, rs12457255, rs2815844, rs10974900 |
| Model_132 | rs6478109, rs56124762, rs1892231, rs16901748, |
| | rs12934476, rs12457255, rs2815844, rs2409750 |
| Model_133 | rs6478109, rs56124762, rs1892231, rs16901748, |
| | rs12934476, rs12457255, rs2815844, rs1541020 |
| Model_134 | rs6478109, rs56124762, rs1892231, rs16901748, |
| | rs12934476, rs12457255, rs2815844, rs4942248 |
| Model_135 | rs6478109, rs56124762, rs1892231, rs16901748, |
| | rs12934476, rs12457255, rs2815844, rs7759385 |
| Model_136 | rs6478109, rs56124762, rs1892231, rs16901748, |
| | rs12934476, rs12457255, rs10974900, rs2409750 |
| Model_137 | rs6478109, rs56124762, rs1892231, rs16901748, |
| | rs12934476, rs12457255, rs10974900, rs1541020 |
| Model_138 | rs6478109, rs56124762, rs1892231, rs16901748, |
| | rs12934476, rs12457255, rs10974900, rs4942248 |
| Model_139 | rs6478109, rs56124762, rs1892231, rs16901748, |
| | rs12934476, rs12457255, rs10974900, rs7759385 |
| Model_140 | rs6478109, rs56124762, rs1892231, rs16901748, |
| | rs12934476, rs12457255, rs2409750, rs1541020 |
| Model_141 | rs6478109, rs56124762, rs1892231, rs16901748, |
| | rs12934476, rs12457255, rs2409750, rs4942248 |
| Model_142 | rs6478109, rs56124762, rs1892231, rs16901748, |
| | rs12934476, rs12457255, rs2409750, rs7759385 |
| Model_143 | rs6478109, rs56124762, rs1892231, rs16901748, |
| | rs12934476, rs12457255, rs1541020, rs4942248 |
| Model_144 | rs6478109, rs56124762, rs1892231, rs16901748, |
| | rs12934476, rs12457255, rs1541020, rs7759385 |
| Model_145 | rs6478109, rs56124762, rs1892231, rs1690 1748, |
| | rs12934476, rs1245 7255, rs4942248, rs7759385 |
| Model_146 | rs6478109, rs56124762, rs1892231, rs16901748, |
| | rs12934476, rs2815844, rs10974900, rs2409750 |
| Model_147 | rs6478109, rs56124762, rs1892231, rs16901748, |
| | rs12934476, rs2815844, rs10974900, rs1541020 |
| Model_148 | rs6478109, rs56124762, rs1892231, rs16901748, |
| | rs12934476, rs2815844, rs10974900, rs4942248 |
| Model_149 | rs6478109, rs56124762, rs1892231, rs16901748, |
| | rs12934476, rs2815844, rs10974900, rs7759385 |
| Model_150 | rs6478109, rs56124762, rs1892231, rs16901748, |
| | rs12934476, rs2815844, rs2409750, rs1541020 |
| Model_151 | rs6478109, rs56124762, rs1892231, rs16901748, |
| | rs12934476, rs2815844, rs2409750, rs4942248 |
| Model_152 | rs6478109, rs56124762, rs1892231, rs16901748, |
| | rs12934476, rs28 15844, rs2409750, rs7759385 |
| Model_153 | rs6478109, rs56124762, rs1892231, rs16901748, |
| | rs12934476, rs2815844, rs1541020, rs4942248 |
| Model_154 | rs6478109, rs56124762, rs1892231, rs16901748, |
| | rs12934476, rs2815844, rs1541020, rs7759385 |
| Model_155 | rs6478109, rs56124762, rs1892231, rs16901748, |
| | rs12934476, rs2815844, rs4942248, rs7759385 |
| Model_156 | rs6478109, rs56124762, rs1892231, rs16901748, |
| | rs12934476, rs10974900, rs2409750, rs1541020 |
| Model_157 | rs6478109, rs56124762, rs1892231, rs16901748, |
| | rs12934476, rs10974900, rs2409750, rs4942248 |
| Model_158 | rs6478109, rs56124762, rs1892231, rs16901748, |
| | rs12934476, rs10974900, rs2409750, rs7759385 |
| Model_159 | rs6478109, rs56124762, rs1892231, rs16901748, |
| | rs12934476, rs10974900, rs1541020, rs4942248 |
| Model_160 | rs6478109, rs56124762, rs1892231, rs16901748, |
| | rs12934476, rs10974900, rs1541020, rs7759385 |
| Model_161 | rs6478109, rs56124762, rs1892231, rs16901748, |
| | rs12934476, rs10974900, rs4942248, rs7759385 |
| Model_162 | rs6478109, rs56124762, rs1892231, rs16901748, |
| | rs12934476, rs2409750, rs1541020, rs4942248 |
| Model_163 | rs6478109, rs56124762, rs1892231, rs16901748, |
| | rs12934476, rs2409750, rs1541020, rs7759385 |
| Model_164 | rs6478109, rs56124762, rs1892231, rs16901748, |
| | rs12934476, rs2409750, rs4942248, rs7759385 |
| Model_165 | rs6478109, rs56124762, rs1892231, rs16901748, |
| | rs12934476, rs1541020, rs4942248, rs7759385 |
| Model_166 | rs6478109, rs56124762, rs1892231, rs16901748, |
| | rs7935393, rs9806914, rs2297437, rs1326860 |
| Model_167 | rs6478109, rs56124762, rs1892231, rs16901748, |
| | rs7935393, rs9806914, rs2297437, rs12457255 |
| Model_168 | rs6478109, rs56124762, rs1892231, rs16901748, |
| | rs7935393, rs9806914, rs2297437, rs2815844 |
| Model_169 | rs6478109, rs56124762, rs1892231, rs16901748, |
| | rs7935393, rs9806914, rs2297437, rs10974900 |
| Model_170 | rs6478109, rs56124762, rs1892231, rs16901748, |
| | rs7935393, rs9806914, rs2297437, rs2409750 |
| Model_171 | rs6478109, rs56124762, rs1892231, rs16901748, |
| | rs7935393, rs9806914, rs2297437, rs1541020 |
| Model_172 | rs6478109, rs56124762, rs1892231, rs16901748, |
| | rs7935393, rs9806914, rs2297437, rs4942248 |
| Model_173 | rs6478109, rs56124762, rs1892231, rs16901748, |
| | rs7935393, rs9806914, rs2297437, rs7759385 |
| Model_174 | rs6478109, rs56124762, rs1892231, rs16901748, |
| | rs7935393, rs9806914, rs1326860, rs12457255 |
| Model_175 | rs6478109, rs56124762, rs1892231, rs16901748, |
| | rs7935393, rs9806914, rs1326860, rs2815844 |
| Model_176 | rs6478109, rs56124762, rs1892231, rs16901748, |
| | rs7935393, rs9806914, rs1326860, rs10974900 |
| Model_177 | rs6478109, rs56124762, rs1892231, rs16901748, |
| | rs7935393, rs9806914, rs1326860, rs2409750 |
| Model_178 | rs6478109, rs56124762, rs1892231, rs16901748, |
| | rs7935393, rs9806914, rs1326860, rs1541020 |
| Model_179 | rs6478109, rs56124762, rs1892231, rs16901748, |
| | rs7935393, rs9806914, rs1326860, rs4942248 |
| Model_180 | rs6478109, rs56124762, rs1892231, rs16901748, |
| | rs7935393, rs9806914, rs1326860, rs7759385 |
| Model_181 | rs6478109, rs56124762, rs1892231, rs16901748, |
| | rs7935393, rs9806914, rs12457255, rs2815844 |
| Model_182 | rs6478109, rs56124762, rs1892231, rs16901748, |
| | rs7935393, rs9806914, rs12457255, rs10974900 |
| Model_183 | rs6478109, rs56124762, rs1892231, rs16901748, |
| | rs7935393, rs9806914, rs12457255, rs2409750 |
| Model_184 | rs6478109, rs56124762, rs1892231, rs16901748, |
| | rs7935393, rs9806914, rs12457255, rs1541020 |
| Model_185 | rs6478109, rs56124762, rs1892231, rs16901748, |
| | rs7935393, rs9806914, rs12457255, rs4942248 |
| Model_186 | rs6478109, rs56124762, rs1892231, rs16901748, |
| | rs7935393, rs9806914, rs12457255, rs7759385 |
| Model_187 | rs6478109, rs56124762, rs1892231, rs16901748, |
| | rs7935393, rs9806914, rs2815844, rs10974900 |
| Model_188 | rs6478109, rs56124762, rs1892231, rs16901748, |
| | rs7935393, rs9806914, rs2815844, rs2409750 |
| Model_189 | rs6478109, rs56124762, rs1892231, rs16901748, |
| | rs7935393, rs9806914, rs2815844, rs1541020 |
| Model_190 | rs6478109, rs56124762, rs1892231, rs16901748, |
| | rs7935393, rs9806914, rs2815844, rs4942248 |
| Model_191 | rs6478109, rs56124762, rs1892231, rs16901748, |
| | rs7935393, rs9806914, rs2815844, rs7759385 |
| Model_192 | rs6478109, rs56124762, rs1892231, rs16901748, |
| | rs7935393, rs9806914, rs10974900, rs2409750 |
| Model_193 | rs6478109, rs56124762, rs1892231, rs16901748, |
| | rs7935393, rs9806914, rs10974900, rs1541020 |
| Model_194 | rs6478109, rs56124762, rs1892231, rs16901748, |
| | rs7935393, rs9806914, rs10974900, rs4942248 |
| Model_195 | rs6478109, rs56124762, rs1892231, rs16901748, |
| | rs7935393, rs9806914, rs10974900, rs7759385 |
| Model_196 | rs6478109, rs56124762, rs1892231, rs16901748, |
| | rs7935393, rs9806914, rs2409750, rs1541020 |
| Model_197 | rs6478109, rs56124762, rs1892231, rs16901748, |
| | rs7935393, rs9806914, rs2409750, rs4942248 |
| Model_198 | rs6478109, rs56124762, rs1892231, rs16901748, |
| | rs7935393, rs9806914, rs2409750, rs7759385 |
| Model_199 | rs6478109, rs56124762, rs1892231, rs16901748, |
| | rs7935393, rs9806914, rs1541020, rs4942248 |
| Model_200 | rs6478109, rs56124762, rs1892231, rs16901748, |
| | rs7935393, rs9806914, rs1541020, rs7759385 |
| Model_201 | rs6478109, rs56124762, rs1892231, rs16901748, |
| | rs7935393, rs9806914, rs4942248, rs7759385 |
| Model_202 | rs6478109, rs56124762, rs1892231, rs16901748, |
| | rs7935393, rs2297437, rs1326860, rs12457255 |
| Model_203 | rs6478109, rs56124762, rs1892231, rs16901748, |
| | rs7935393, rs2297437, rs1326860, rs2815844 |
| Model_204 | rs6478109, rs56124762, rs1892231, rs16901748, |
| | rs7935393, rs2297437, rs1326860, rs10974900 |
| Model_205 | rs6478109, rs56124762, rs1892231, rs16901748, |
| | rs7935393, rs2297437, rs1326860, rs2409750 |
| Model_206 | rs6478109, rs56124762, rs1892231, rs16901748, |
| | rs7935393, rs2297437, rs1326860, rs1541020 |
| Model_207 | rs6478109, rs56124762, rs1892231, rs16901748, |
| | rs7935393, rs2297437, rs1326860, rs4942248 |
| Model_208 | rs6478109, rs56124762, rs1892231, rs16901748, |
| | rs7935393, rs2297437, rs1326860, rs7759385 |
| Model_209 | rs6478109, rs56124762, rs1892231, rs16901748, |
| | rs7935393, rs2297437, rs12457255, rs2815844 |
| Model_210 | rs6478109, rs56124762, rs1892231, rs16901748, |
| | rs7935393, rs2297437, rs12457255, rs10974900 |
| Model_211 | rs6478109, rs56124762, rs1892231, rs16901748, |
| | rs7935393, rs2297437, rs12457255, rs2409750 |
| Model_212 | rs6478109, rs56124762, rs1892231, rs16901748, |
| | rs7935393, rs2297437, rs12457255, rs1541020 |
| Model_213 | rs6478109, rs56124762, rs1892231, rs16901748, |
| | rs7935393, rs2297437, rs12457255, rs4942248 |
| Model_214 | rs6478109, rs56124762, rs1892231, rs16901748, |
| | rs7935393, rs2297437, rs12457255, rs7759385 |
| Model_215 | rs6478109, rs56124762, rs1892231, rs16901748, |
| | rs7935393, rs2297437, rs2815844, rs10974900 |
| Model_216 | rs6478109, rs56124762, rs1892231, rs16901748, |
| | rs7935393, rs2297437, rs2815844, rs2409750 |
| Model_217 | rs6478109, rs56124762, rs1892231, rs16901748, |
| | rs7935393, rs2297437, rs2815844, rs1541020 |
| Model_218 | rs6478109, rs56124762, rs1892231, rs16901748, |
| | rs7935393, rs2297437, rs2815844, rs4942248 |
| Model_219 | rs6478109, rs56124762, rs1892231, rs16901748, |
| | rs7935393, rs2297437, rs2815844, rs7759385 |
| Model_220 | rs6478109, rs56124762, rs1892231, rs16901748, |
| | rs7935393, rs2297437, rs10974900, rs2409750 |
| Model_221 | rs6478109, rs56124762, rs1892231, rs16901748, |
| | rs7935393, rs2297437, rs10974900, rs1541020 |
| Model_222 | rs6478109, rs56124762, rs1892231, rs16901748, |
| | rs7935393, rs2297437, rs10974900, rs4942248 |
| Model_223 | rs6478109, rs56124762, rs1892231, rs16901748, |
| | rs7935393, rs2297437, rs10974900, rs7759385 |
| Model_224 | rs6478109, rs56124762, rs1892231, rs16901748, |
| | rs7935393, rs2297437, rs2409750, rs1541020 |
| Model_225 | rs6478109, rs56124762, rs1892231, rs16901748, |
| | rs7935393, rs2297437, rs2409750, rs4942248 |
| Model_226 | rs6478109, rs56124762, rs1892231, rs16901748, |
| | rs7935393, rs2297437, rs2409750, rs7759385 |
| Model_227 | rs6478109, rs56124762, rs1892231, rs16901748, |
| | rs7935393, rs2297437, rs1541020, rs4942248 |
| Model_228 | rs6478109, rs56124762, rs1892231, rs16901748, |
| | rs7935393, rs2297437, rs1541020, rs7759385 |
| Model_229 | rs6478109, rs56124762, rs1892231, rs16901748, |
| | rs7935393, rs2297437, rs4942248, rs7759385 |
| Model_230 | rs6478109, rs56124762, rs1892231, rs16901748, |
| | rs7935393, rs1326860, rs12457255, rs2815844 |
| Model_231 | rs6478109, rs56124762, rs1892231, rs16901748, |
| | rs7935393, rs1326860, rs12457255, rs10974900 |
| Model_232 | rs6478109, rs56124762, rs1892231, rs16901748, |
| | rs7935393, rs1326860, rs12457255, rs2409750 |
| Model_233 | rs6478109, rs56124762, rs1892231, rs16901748, |
| | rs7935393, rs1326860, rs12457255, rs1541020 |
| Model_234 | rs6478109, rs56124762, rs1892231, rs16901748, |
| | rs7935393, rs1326860, rs12457255, rs4942248 |
| Model_235 | rs6478109, rs56124762, rs1892231, rs16901748, |
| | rs7935393, rs1326860, rs12457255, rs7759385 |
| Model_236 | rs6478109, rs56124762, rs1892231, rs16901748, |
| | rs7935393, rs1326860, rs2815844, rs10974900 |
| Model_237 | rs6478109, rs56124762, rs1892231, rs16901748, |
| | rs7935393, rs1326860, rs2815844, rs2409750 |
| Model_238 | rs6478109, rs56124762, rs1892231, rs16901748, |
| | rs7935393, rs1326860, rs2815844, rs1541020 |
| Model_239 | rs6478109, rs56124762, rs1892231, rs16901748, |
| | rs7935393, rs1326860, rs2815844, rs4942248 |
| Model_240 | rs6478109, rs56124762, rs1892231, rs16901748, |
| | rs7935393, rs1326860, rs2815844, rs7759385 |
| Model_241 | rs6478109, rs56124762, rs1892231, rs16901748, |
| | rs7935393, rs1326860, rs10974900, rs2409750 |
| Model_242 | rs6478109, rs56124762, rs1892231, rs16901748, |
| | rs7935393, rs1326860, rs10974900, rs1541020 |
| Model_243 | rs6478109, rs56124762, rs1892231, rs16901748, |
| | rs7935393, rs1326860, rs10974900, rs4942248 |
| Model_244 | rs6478109, rs56124762, rs1892231, rs16901748, |
| | rs7935393, rs1326860, rs10974900, rs7759385 |
| Model_245 | rs6478109, rs56124762, rs1892231, rs16901748, |
| | rs7935393, rs1326860, rs2409750, rs1541020 |
| Model_246 | rs6478109, rs56124762, rs1892231, rs16901748, |
| | rs7935393, rs1326860, rs2409750, rs4942248 |
| Model_247 | rs6478109, rs56124762, rs1892231, rs16901748, |
| | rs7935393, rs1326860, rs2409750, rs7759385 |
| Model_248 | rs6478109, rs56124762, rs1892231, rs16901748, |
| | rs7935393, rs1326860, rs1541020, rs4942248 |
| Model_249 | rs6478109, rs56124762, rs1892231, rs16901748, |
| | rs7935393, rs1326860, rs1541020, rs7759385 |
| Model_250 | rs6478109, rs56124762, rs1892231, rs16901748, |
| | rs7935393, rs1326860, rs4942248, rs7759385 |
| Model_251 | rs6478109, rs56124762, rs1892231, rs16901748, |
| | rs7935393, rs12457255, rs2815844, rs10974900 |
| Model_252 | rs6478109, rs56124762, rs1892231, rs16901748, |
| | rs7935393, rs12457255, rs2815844, rs2409750 |
| Model_253 | rs6478109, rs56124762, rs1892231, rs16901748, |
| | rs7935393, rs12457255, rs2815844, rs1541020 |
| Model_254 | rs6478109, rs56124762, rs1892231, rs16901748, |
| | rs7935393, rs12457255, rs2815844, rs4942248 |
| Model_255 | rs6478109, rs56124762, rs1892231, rs16901748, |
| | rs7935393, rs12457255, rs2815844, rs7759385 |
| Model_256 | rs6478109, rs56124762, rs1892231, rs16901748, |
| | rs7935393, rs12457255, rs10974900, rs2409750 |
| Model_257 | rs6478109, rs56124762, rs1892231, rs16901748, |
| | rs7935393, rs12457255, rs10974900, rs1541020 |
| Model_258 | rs6478109, rs56124762, rs1892231, rs16901748, |
| | rs7935393, rs12457255, rs10974900, rs4942248 |
| Model_259 | rs6478109, rs56124762, rs1892231, rs16901748, |
| | rs7935393, rs12457255, rs10974900, rs7759385 |
| Model_260 | rs6478109, rs56124762, rs1892231, rs16901748, |
| | rs7935393, rs12457255, rs2409750, rs1541020 |
| Model_261 | rs6478109, rs56124762, rs1892231, rs16901748, |
| | rs7935393, rs12457255, rs2409750, rs4942248 |
| Model_262 | rs6478109, rs56124762, rs1892231, rs16901748, |
| | rs7935393, rs12457255, rs2409750, rs7759385 |
| Model_263 | rs6478109, rs56124762, rs1892231, rs16901748, |
| | rs7935393, rs12457255, rs1541020, rs4942248 |
| Model_264 | rs6478109, rs56124762, rs1892231, rs16901748, |
| | rs7935393, rs12457255, rs1541020, rs7759385 |
| Model_265 | rs6478109, rs56124762, rs1892231, rs16901748, |
| | rs7935393, rs12457255, rs4942248, rs7759385 |
| Model_266 | rs6478109, rs56124762, rs1892231, rs16901748, |
| | rs7935393, rs2815844, rs10974900, rs2409750 |
| Model_267 | rs6478109, rs56124762, rs1892231, rs16901748, |
| | rs7935393, rs2815844, rs10974900, rs1541020 |
| Model_268 | rs6478109, rs56124762, rs1892231, rs16901748, |
| | rs7935393, rs2815844, rs10974900, rs4942248 |
| Model_269 | rs6478109, rs56124762, rs1892231, rs16901748, |
| | rs7935393, rs2815844, rs10974900, rs7759385 |
| Model_270 | rs6478109, rs56124762, rs1892231, rs16901748, |
| | rs7935393, rs2815844, rs2409750, rs1541020 |
| Model_271 | rs6478109, rs56124762, rs1892231, rs16901748, |
| | rs7935393, rs2815844, rs2409750, rs4942248 |
| Model_272 | rs6478109, rs56124762, rs1892231, rs16901748, |
| | rs7935393, rs2815844, rs2409750, rs7759385 |
| Model_273 | rs6478109, rs56124762, rs1892231, rs16901748, |
| | rs7935393, rs2815844, rs1541020, rs4942248 |
| Model_274 | rs6478109, rs56124762, rs1892231, rs16901748, |
| | rs7935393, rs2815844, rs1541020, rs7759385 |
| Model_275 | rs6478109, rs56124762, rs1892231, rs16901748, |
| | rs7935393, rs2815844, rs4942248, rs7759385 |
| Model_276 | rs6478109, rs56124762, rs1892231, rs16901748, |
| | rs7935393, rs10974900, rs2409750, rs1541020 |
| Model_277 | rs6478109, rs56124762, rs1892231, rs16901748, |
| | rs7935393, rs10974900, rs2409750, rs4942248 |
| Model_278 | rs6478109, rs56124762, rs1892231, rs16901748, |
| | rs7935393, rs10974900, rs2409750, rs7759385 |
| Model_279 | rs6478109, rs56124762, rs1892231, rs16901748, |
| | rs7935393, rs10974900, rs1541020, rs4942248 |
| Model_280 | rs6478109, rs56124762, rs1892231, rs16901748, |
| | rs7935393, rs10974900, rs1541020, rs7759385 |
| Model_281 | rs6478109, rs56124762, rs1892231, rs16901748, |
| | rs7935393, rs10974900, rs4942248, rs7759385 |
| Model_282 | rs6478109, rs56124762, rs1892231, rs16901748, |
| | rs7935393, rs2409750, rs1541020, rs4942248 |
| Model_283 | rs6478109, rs56124762, rs1892231, rs16901748, |
| | rs7935393, rs2409750, rs1541020, rs7759385 |
| Model_284 | rs6478109, rs56124762, rs1892231, rs16901748, |
| | rs7935393, rs2409750, rs4942248, rs7759385 |
| Model_285 | rs6478109, rs56124762, rs1892231, rs16901748, |
| | rs7935393, rs1541020, rs4942248, rs7759385 |
| Model_286 | rs6478109, rs56124762, rs1892231, rs16901748, |
| | rs9806914, rs2297437, rs1326860, rs12457255 |
| Model_287 | rs6478109, rs56124762, rs1892231, rs16901748, |
| | rs9806914, rs2297437, rs1326860, rs2815844 |
| Model_288 | rs6478109, rs56124762, rs1892231, rs16901748, |
| | rs9806914, rs2297437, rs1326860, rs10974900 |
| Model_289 | rs6478109, rs56124762, rs1892231, rs16901748, |
| | rs9806914, rs2297437, rs1326860, rs2409750 |
| Model_290 | rs6478109, rs56124762, rs1892231, rs16901748, |
| | rs9806914, rs2297437, rs1326860, rs1541020 |
| Model_291 | rs6478109, rs56124762, rs1892231, rs16901748, |
| | rs9806914, rs2297437, rs1326860, rs4942248 |
| Model_292 | rs6478109, rs56124762, rs1892231, rs16901748, |
| | rs9806914, rs2297437, rs1326860, rs7759385 |
| Model_293 | rs6478109, rs56124762, rs1892231, rs16901748, |
| | rs9806914, rs2297437, rs12457255, rs2815844 |
| Model_294 | rs6478109, rs56124762, rs1892231, rs16901748, |
| | rs9806914, rs2297437, rs12457255, rs10974900 |
| Model_295 | rs6478109, rs56124762, rs1892231, rs16901748, |
| | rs9806914, rs2297437, rs12457255, rs2409750 |
| Model_296 | rs6478109, rs56124762, rs1892231, rs16901748, |
| | rs9806914, rs2297437, rs12457255, rs1541020 |
| Model_297 | rs6478109, rs56124762, rs1892231, rs16901748, |
| | rs9806914, rs2297437, rs12457255, rs4942248 |
| Model_298 | rs6478109, rs56124762, rs1892231, rs16901748, |
| | rs9806914, rs2297437, rs12457255, rs7759385 |
| Model_299 | rs6478109, rs56124762, rs1892231, rs16901748, |
| | rs9806914, rs2297437, rs2815844, rs10974900 |
| Model_300 | rs6478109, rs56124762, rs1892231, rs16901748, |
| | rs9806914, rs2297437, rs2815844, rs2409750 |
| Model_301 | rs6478109, rs56124762, rs1892231, rs16901748, |
| | rs9806914, rs2297437, rs2815844, rs1541020 |
| Model_302 | rs6478109, rs56124762, rs1892231, rs16901748, |
| | rs9806914, rs2297437, rs2815844, rs4942248 |
| Model_303 | rs6478109, rs56124762, rs1892231, rs16901748, |
| | rs9806914, rs2297437, rs2815844, rs7759385 |
| Model_304 | rs6478109, rs56124762, rs1892231, rs16901748, |
| | rs9806914, rs2297437, rs10974900, rs2409750 |
| Model_305 | rs6478109, rs56124762, rs1892231, rs16901748, |
| | rs9806914, rs2297437, rs10974900, rs1541020 |
| Model_306 | rs6478109, rs56124762, rs1892231, rs16901748, |
| | rs9806914, rs2297437, rs10974900, rs4942248 |
| Model_307 | rs6478109, rs56124762, rs1892231, rs16901748, |
| | rs9806914, rs2297437, rs10974900, rs7759385 |
| Model_308 | rs6478109, rs56124762, rs1892231, rs16901748, |
| | rs9806914, rs2297437, rs2409750, rs1541020 |
| Model_309 | rs6478109, rs56124762, rs1892231, rs16901748, |
| | rs9806914, rs2297437, rs2409750, rs4942248 |
| Model_310 | rs6478109, rs56124762, rs1892231, rs16901748, |
| | rs9806914, rs2297437, rs2409750, rs7759385 |
| Model_311 | rs6478109, rs56124762, rs1892231, rs16901748, |
| | rs9806914, rs2297437, rs1541020, rs4942248 |
| Model_312 | rs6478109, rs56124762, rs1892231, rs16901748, |
| | rs9806914, rs2297437, rs1541020, rs7759385 |
| Model_313 | rs6478109, rs56124762, rs1892231, rs16901748, |
| | rs9806914, rs2297437, rs4942248, rs7759385 |
| Model_314 | rs6478109, rs56124762, rs1892231, rs16901748, |
| | rs9806914, rs1326860, rs12457255, rs2815844 |
| Model_315 | rs6478109, rs56124762, rs1892231, rs16901748, |
| | rs9806914, rs1326860, rs12457255, rs10974900 |
| Model_316 | rs6478109, rs56124762, rs1892231, rs16901748, |
| | rs9806914, rs1326860, rs12457255, rs2409750 |
| Model_317 | rs6478109, rs56124762, rs1892231, rs16901748, |
| | rs9806914, rs1326860, rs12457255, rs1541020 |
| Model_318 | rs6478109, rs56124762, rs1892231, rs16901748, |
| | rs9806914, rs1326860, rs12457255, rs4942248 |
| Model_319 | rs6478109, rs56124762, rs1892231, rs16901748, |
| | rs9806914, rs1326860, rs12457255, rs7759385 |
| Model_320 | rs6478109, rs56124762, rs1892231, rs16901748, |
| | rs9806914, rs1326860, rs2815844, rs10974900 |
| Model_321 | rs6478109, rs56124762, rs1892231, rs16901748, |
| | rs9806914, rs1326860, rs2815844, rs2409750 |
| Model_322 | rs6478109, rs56124762, rs1892231, rs16901748, |
| | rs9806914, rs1326860, rs2815844, rs1541020 |
| Model_323 | rs6478109, rs56124762, rs1892231, rs16901748, |
| | rs9806914, rs1326860, rs2815844, rs4942248 |
| Model_324 | rs6478109, rs56124762, rs1892231, rs16901748, |
| | rs9806914, rs1326860, rs2815844, rs7759385 |
| Model_325 | rs6478109, rs56124762, rs1892231, rs16901748, |
| | rs9806914, rs1326860, rs10974900, rs2409750 |
| Model_326 | rs6478109, rs56124762, rs1892231, rs16901748, |
| | rs9806914, rs1326860, rs10974900, rs1541020 |
| Model_327 | rs6478109, rs56124762, rs1892231, rs16901748, |
| | rs9806914, rs1326860, rs10974900, rs4942248 |
| Model_328 | rs6478109, rs56124762, rs1892231, rs16901748, |
| | rs9806914, rs1326860, rs10974900, rs7759385 |
| Model_329 | rs6478109, rs56124762, rs1892231, rs16901748, |
| | rs9806914, rs1326860, rs2409750, rs1541020 |
| Model_330 | rs6478109, rs56124762, rs1892231, rs16901748, |
| | rs9806914, rs1326860, rs2409750, rs4942248 |
| Model_331 | rs6478109, rs56124762, rs1892231, rs16901748, |
| | rs9806914, rs1326860, rs2409750, rs7759385 |
| Model_332 | rs6478109, rs56124762, rs1892231, rs16901748, |
| | rs9806914, rs1326860, rs1541020, rs4942248 |
| Model_333 | rs6478109, rs56124762, rs1892231, rs16901748, |
| | rs9806914, rs1326860, rs1541020, rs7759385 |
| Model_334 | rs6478109, rs56124762, rs1892231, rs16901748, |
| | rs9806914, rs1326860, rs4942248, rs7759385 |
| Model_335 | rs6478109, rs56124762, rs1892231, rs16901748, |
| | rs9806914, rs12457255, rs2815844, rs10974900 |
| Model_336 | rs6478109, rs56124762, rs1892231, rs16901748, |
| | rs9806914, rs12457255, rs2815844, rs2409750 |
| Model_337 | rs6478109, rs56124762, rs1892231, rs16901748, |
| | rs9806914, rs12457255, rs2815844, rs1541020 |
| Model_338 | rs6478109, rs56124762, rs1892231, rs16901748, |
| | rs9806914, rs12457255, rs2815844, rs4942248 |
| Model_339 | rs6478109, rs56124762, rs1892231, rs16901748, |
| | rs9806914, rs12457255, rs2815844, rs7759385 |
| Model_340 | rs6478109, rs56124762, rs1892231, rs16901748, |
| | rs9806914, rs12457255, rs10974900, rs2409750 |
| Model_341 | rs6478109, rs56124762, rs1892231, rs16901748, |
| | rs9806914, rs12457255, rs10974900, rs1541020 |
| Model_342 | rs6478109, rs56124762, rs1892231, rs16901748, |
| | rs9806914, rs12457255, rs10974900, rs4942248 |
| Model_343 | rs6478109, rs56124762, rs1892231, rs16901748, |
| | rs9806914, rs12457255, rs10974900, rs7759385 |
| Model_344 | rs6478109, rs56124762, rs1892231, rs16901748, |
| | rs9806914, rs12457255, rs2409750, rs1541020 |
| Model_345 | rs6478109, rs56124762, rs1892231, rs16901748, |
| | rs9806914, rs12457255, rs2409750, rs4942248 |
| Model_346 | rs6478109, rs56124762, rs1892231, rs16901748, |
| | rs9806914, rs12457255, rs2409750, rs7759385 |
| Model_347 | rs6478109, rs56124762, rs1892231, rs16901748, |
| | rs9806914, rs12457255, rs1541020, rs4942248 |
| Model_348 | rs6478109, rs56124762, rs1892231, rs16901748, |
| | rs9806914, rs12457255, rs1541020, rs7759385 |
| Model_349 | rs6478109, rs56124762, rs1892231, rs16901748, |
| | rs9806914, rs12457255, rs4942248, rs7759385 |
| Model_350 | rs6478109, rs56124762, rs1892231, rs16901748, |
| | rs9806914, rs2815844, rs10974900, rs2409750 |
| Model_351 | rs6478109, rs56124762, rs1892231, rs16901748, |
| | rs9806914, rs2815844, rs10974900, rs1541020 |
| Model_352 | rs6478109, rs56124762, rs1892231, rs16901748, |
| | rs9806914, rs2815844, rs10974900, rs4942248 |
| Model_353 | rs6478109, rs56124762, rs1892231, rs16901748, |
| | rs9806914, rs2815844, rs10974900, rs7759385 |
| Model_354 | rs6478109, rs56124762, rs1892231, rs16901748, |
| | rs9806914, rs2815844, rs2409750, rs1541020 |
| Model_355 | rs6478109, rs56124762, rs1892231, rs16901748, |
| | rs9806914, rs2815844, rs2409750, rs4942248 |
| Model_356 | rs6478109, rs56124762, rs1892231, rs16901748, |
| | rs9806914, rs2815844, rs2409750, rs7759385 |
| Model_357 | rs6478109, rs56124762, rs1892231, rs16901748, |
| | rs9806914, rs2815844, rs1541020, rs4942248 |
| Model_358 | rs6478109, rs56124762, rs1892231, rs16901748, |
| | rs9806914, rs2815844, rs1541020, rs7759385 |
| Model_359 | rs6478109, rs56124762, rs1892231, rs16901748, |
| | rs9806914, rs2815844, rs4942248, rs7759385 |
| Model_360 | rs6478109, rs56124762, rs1892231, rs16901748, |
| | rs9806914, rs10974900, rs2409750, rs1541020 |
| Model_361 | rs6478109, rs56124762, rs1892231, rs16901748, |
| | rs9806914, rs10974900, rs2409750, rs4942248 |
| Model_362 | rs6478109, rs56124762, rs1892231, rs16901748, |
| | rs9806914, rs10974900, rs2409750, rs7759385 |
| Model_363 | rs6478109, rs56124762, rs1892231, rs16901748, |
| | rs9806914, rs10974900, rs1541020, rs4942248 |
| Model_364 | rs6478109, rs56124762, rs1892231, rs16901748, |
| | rs9806914, rs10974900, rs1541020, rs7759385 |
| Model_365 | rs6478109, rs56124762, rs1892231, rs16901748, |
| | rs9806914, rs10974900, rs4942248, rs7759385 |
| Model_366 | rs6478109, rs56124762, rs1892231, rs16901748, |
| | rs9806914, rs2409750, rs1541020, rs4942248 |
| Model_367 | rs6478109, rs56124762, rs1892231, rs16901748, |
| | rs9806914, rs2409750, rs1541020, rs7759385 |
| Model_368 | rs6478109, rs56124762, rs1892231, rs16901748, |
| | rs9806914, rs2409750, rs4942248, rs7759385 |
| Model_369 | rs6478109, rs56124762, rs1892231, rs16901748, |
| | rs9806914, rs1541020, rs4942248, rs7759385 |
| Model_370 | rs6478109, rs56124762, rs1892231, rs16901748, |
| | rs2297437, rs1326860, rs12457255, rs2815844 |
| Model_371 | rs6478109, rs56124762, rs1892231, rs16901748, |
| | rs2297437, rs1326860, rs12457255, rs10974900 |
| Model_372 | rs6478109, rs56124762, rs1892231, rs16901748, |
| | rs2297437, rs1326860, rs12457255, rs2409750 |
| Model_373 | rs6478109, rs56124762, rs1892231, rs16901748, |
| | rs2297437, rs1326860, rs12457255, rs1541020 |
| Model_374 | rs6478109, rs56124762, rs1892231, rs16901748, |
| | rs2297437, rs1326860, rs12457255, rs4942248 |
| Model_375 | rs6478109, rs56124762, rs1892231, rs16901748, |
| | rs2297437, rs1326860, rs12457255, rs7759385 |
| Model_376 | rs6478109, rs56124762, rs1892231, rs16901748, |
| | rs2297437, rs1326860, rs2815844, rs10974900 |
| Model_377 | rs6478109, rs56124762, rs1892231, rs16901748, |
| | rs2297437, rs1326860, rs2815844, rs2409750 |
| Model_378 | rs6478109, rs56124762, rs1892231, rs16901748, |
| | rs2297437, rs1326860, rs2815844, rs1541020 |
| Model_379 | rs6478109, rs56124762, rs1892231, rs16901748, |
| | rs2297437, rs1326860, rs2815844, rs4942248 |
| Model_380 | rs6478109, rs56124762, rs1892231, rs16901748, |
| | rs2297437, rs1326860, rs2815844, rs7759385 |
| Model_381 | rs6478109, rs56124762, rs1892231, rs16901748, |
| | rs2297437, rs1326860, rs10974900, rs2409750 |
| Model_382 | rs6478109, rs56124762, rs1892231, rs16901748, |
| | rs2297437, rs1326860, rs10974900, rs1541020 |
| Model_383 | rs6478109, rs56124762, rs1892231, rs16901748, |
| | rs2297437, rs1326860, rs10974900, rs4942248 |
| Model_384 | rs6478109, rs56124762, rs1892231, rs16901748, |
| | rs2297437, rs1326860, rs10974900, rs7759385 |
| Model_385 | rs6478109, rs56124762, rs1892231, rs16901748, |
| | rs2297437, rs1326860, rs2409750, rs1541020 |
| Model_386 | rs6478109, rs56124762, rs1892231, rs16901748, |
| | rs2297437, rs1326860, rs2409750, rs4942248 |
| Model_387 | rs6478109, rs56124762, rs1892231, rs16901748, |
| | rs2297437, rs1326860, rs2409750, rs7759385 |
| Model_388 | rs6478109, rs56124762, rs1892231, rs16901748, |
| | rs2297437, rs1326860, rs1541020, rs4942248 |
| Model_389 | rs6478109, rs56124762, rs1892231, rs16901748, |
| | rs2297437, rs1326860, rs1541020, rs7759385 |
| Model_390 | rs6478109, rs56124762, rs1892231, rs16901748, |
| | rs2297437, rs1326860, rs4942248, rs7759385 |
| Model_391 | rs6478109, rs56124762, rs1892231, rs16901748, |
| | rs2297437, rs12457255, rs2815844, rs10974900 |
| Model_392 | rs6478109, rs56124762, rs1892231, rs16901748, |
| | rs2297437, rs12457255, rs2815844, rs2409750 |
| Model_393 | rs6478109, rs56124762, rs1892231, rs16901748, |
| | rs2297437, rs12457255, rs2815844, rs1541020 |
| Model_394 | rs6478109, rs56124762, rs1892231, rs16901748, |
| | rs2297437, rs12457255, rs2815844, rs4942248 |
| Model_395 | rs6478109, rs56124762, rs1892231, rs16901748, |
| | rs2297437, rs12457255, rs2815844, rs7759385 |
| Model_396 | rs6478109, rs56124762, rs1892231, rs16901748, |
| | rs2297437, rs12457255, rs10974900, rs2409750 |
| Model_397 | rs6478109, rs56124762, rs1892231, rs16901748, |
| | rs2297437, rs12457255, rs10974900, rs1541020 |
| Model_398 | rs6478109, rs56124762, rs1892231, rs16901748, |
| | rs2297437, rs12457255, rs10974900, rs4942248 |
| Model_399 | rs6478109, rs56124762, rs1892231, rs16901748, |
| | rs2297437, rs12457255, rs10974900, rs7759385 |
| Model_400 | rs6478109, rs56124762, rs1892231, rs16901748, |
| | rs2297437, rs12457255, rs2409750, rs1541020 |
| Model_401 | rs6478109, rs56124762, rs1892231, rs16901748, |
| | rs2297437, rs12457255, rs2409750, rs4942248 |
| Model_402 | rs6478109, rs56124762, rs1892231, rs16901748, |
| | rs2297437, rs12457255, rs2409750, rs7759385 |
| Model_403 | rs6478109, rs56124762, rs1892231, rs16901748, |
| | rs2297437, rs12457255, rs1541020, rs4942248 |
| Model_404 | rs6478109, rs56124762, rs1892231, rs16901748, |
| | rs2297437, rs12457255, rs1541020, rs7759385 |
| Model_405 | rs6478109, rs56124762, rs1892231, rs16901748, |
| | rs2297437, rs12457255, rs4942248, rs7759385 |
| Model_406 | rs6478109, rs56124762, rs1892231, rs16901748, |
| | rs2297437, rs2815844, rs10974900, rs2409750 |
| Model_407 | rs6478109, rs56124762, rs1892231, rs16901748, |
| | rs2297437, rs2815844, rs10974900, rs1541020 |
| Model_408 | rs6478109, rs56124762, rs1892231, rs16901748, |
| | rs2297437, rs2815844, rs10974900, rs4942248 |
| Model_409 | rs6478109, rs56124762, rs1892231, rs16901748, |
| | rs2297437, rs2815844, rs10974900, rs7759385 |
| Model_410 | rs6478109, rs56124762, rs1892231, rs16901748, |
| | rs2297437, rs2815844, rs2409750, rs1541020 |
| Model_411 | rs6478109, rs56124762, rs1892231, rs16901748, |
| | rs2297437, rs2815844, rs2409750, rs4942248 |
| Model_412 | rs6478109, rs56124762, rs1892231, rs16901748, |
| | rs2297437, rs2815844, rs2409750, rs7759385 |
| Model_413 | rs6478109, rs56124762, rs1892231, rs16901748, |
| | rs2297437, rs2815844, rs1541020, rs4942248 |
| Model_414 | rs6478109, rs56124762, rs1892231, rs16901748, |
| | rs2297437, rs2815844, rs1541020, rs7759385 |
| Model_415 | rs6478109, rs56124762, rs1892231, rs16901748, |
| | rs2297437, rs2815844, rs4942248, rs7759385 |
| Model_416 | rs6478109, rs56124762, rs1892231, rs16901748, |
| | rs2297437, rs10974900, rs2409750, rs1541020 |
| Model_417 | rs6478109, rs56124762, rs1892231, rs16901748, |
| | rs2297437, rs10974900, rs2409750, rs4942248 |
| Model_418 | rs6478109, rs56124762, rs1892231, rs16901748, |
| | rs2297437, rs10974900, rs2409750, rs7759385 |
| Model_419 | rs6478109, rs56124762, rs1892231, rs16901748, |
| | rs2297437, rs10974900, rs1541020, rs4942248 |
| Model_420 | rs6478109, rs56124762, rs1892231, rs16901748, |
| | rs2297437, rs10974900, rs1541020, rs7759385 |
| Model_421 | rs6478109, rs56124762, rs1892231, rs16901748, |
| | rs2297437, rs10974900, rs4942248, rs7759385 |
| Model_422 | rs6478109, rs56124762, rs1892231, rs16901748, |
| | rs2297437, rs2409750, rs1541020, rs4942248 |
| Model_423 | rs6478109, rs56124762, rs1892231, rs16901748, |
| | rs2297437, rs2409750, rs1541020, rs7759385 |
| Model_424 | rs6478109, rs56124762, rs1892231, rs16901748, |
| | rs2297437, rs2409750, rs4942248, rs7759385 |
| Model_425 | rs6478109, rs56124762, rs1892231, rs16901748, |
| | rs2297437, rs1541020, rs4942248, rs7759385 |
| Model_426 | rs6478109, rs56124762, rs1892231, rs16901748, |
| | rs1326860, rs12457255, rs2815844, rs10974900 |
| Model_427 | rs6478109, rs56124762, rs1892231, rs16901748, |
| | rs1326860, rs12457255, rs2815844, rs2409750 |
| Model_428 | rs6478109, rs56124762, rs1892231, rs16901748, |
| | rs1326860, rs12457255, rs2815844, rs1541020 |
| Model_429 | rs6478109, rs56124762, rs1892231, rs16901748, |
| | rs1326860, rs12457255, rs2815844, rs4942248 |
| Model_430 | rs6478109, rs56124762, rs1892231, rs16901748, |
| | rs1326860, rs12457255, rs2815844, rs7759385 |
| Model_431 | rs6478109, rs56124762, rs1892231, rs16901748, |
| | rs1326860, rs12457255, rs10974900, rs2409750 |
| Model_432 | rs6478109, rs56124762, rs1892231, rs16901748, |
| | rs1326860, rs12457255, rs10974900, rs1541020 |
| Model_433 | rs6478109, rs56124762, rs1892231, rs16901748, |
| | rs1326860, rs12457255, rs10974900, rs4942248 |
| Model_434 | rs6478109, rs56124762, rs1892231, rs16901748, |
| | rs1326860, rs12457255, rs10974900, rs7759385 |
| Model_435 | rs6478109, rs56124762, rs1892231, rs16901748, |
| | rs1326860, rs12457255, rs2409750, rs1541020 |
| Model_436 | rs6478109, rs56124762, rs1892231, rs16901748, |
| | rs1326860, rs12457255, rs2409750, rs4942248 |
| Model_437 | rs6478109, rs56124762, rs1892231, rs16901748, |
| | rs1326860, rs12457255, rs2409750, rs7759385 |
| Model_438 | rs6478109, rs56124762, rs1892231, rs16901748, |
| | rs1326860, rs12457255, rs1541020, rs4942248 |
| Model_439 | rs6478109, rs56124762, rs1892231, rs16901748, |
| | rs1326860, rs12457255, rs1541020, rs7759385 |
| Model_440 | rs6478109, rs56124762, rs1892231, rs16901748, |
| | rs1326860, rs12457255, rs4942248, rs7759385 |
| Model_441 | rs6478109, rs56124762, rs1892231, rs16901748, |
| | rs1326860, rs2815844, rs10974900, rs2409750 |
| Model_442 | rs6478109, rs56124762, rs1892231, rs16901748, |
| | rs1326860, rs2815844, rs10974900, rs1541020 |
| Model_443 | rs6478109, rs56124762, rs1892231, rs16901748, |
| | rs1326860, rs2815844, rs10974900, rs4942248 |
| Model_444 | rs6478109, rs56124762, rs1892231, rs16901748, |
| | rs1326860, rs2815844, rs10974900, rs7759385 |
| Model_445 | rs6478109, rs56124762, rs1892231, rs16901748, |
| | rs1326860, rs2815844, rs2409750, rs1541020 |
| Model_446 | rs6478109, rs56124762, rs1892231, rs16901748, |
| | rs1326860, rs2815844, rs2409750, rs4942248 |
| Model_447 | rs6478109, rs56124762, rs1892231, rs16901748, |
| | rs1326860, rs2815844, rs2409750, rs7759385 |
| Model_448 | rs6478109, rs56124762, rs1892231, rs16901748, |
| | rs1326860, rs2815844, rs1541020, rs4942248 |
| Model_449 | rs6478109, rs56124762, rs1892231, rs16901748, |
| | rs1326860, rs2815844, rs1541020, rs7759385 |
| Model_450 | rs6478109, rs56124762, rs1892231, rs16901748, |
| | rs1326860, rs2815844, rs4942248, rs7759385 |
| Model_451 | rs6478109, rs56124762, rs1892231, rs16901748, |
| | rs1326860, rs10974900, rs2409750, rs1541020 |
| Model_452 | rs6478109, rs56124762, rs1892231, rs16901748, |
| | rs1326860, rs10974900, rs2409750, rs4942248 |
| Model_453 | rs6478109, rs56124762, rs1892231, rs16901748, |
| | rs1326860, rs10974900, rs2409750, rs7759385 |
| Model_454 | rs6478109, rs56124762, rs1892231, rs16901748, |
| | rs1326860, rs10974900, rs1541020, rs4942248 |
| Model_455 | rs6478109, rs56124762, rs1892231, rs16901748, |
| | rs1326860, rs10974900, rs1541020, rs7759385 |
| Model_456 | rs6478109, rs56124762, rs1892231, rs16901748, |
| | rs1326860, rs10974900, rs4942248, rs7759385 |
| Model_457 | rs6478109, rs56124762, rs1892231, rs16901748, |
| | rs1326860, rs2409750, rs1541020, rs4942248 |
| Model_458 | rs6478109, rs56124762, rs1892231, rs16901748, |
| | rs1326860, rs2409750, rs1541020, rs7759385 |
| Model_459 | rs6478109, rs56124762, rs1892231, rs16901748, |
| | rs1326860, rs2409750, rs4942248, rs7759385 |
| Model_460 | rs6478109, rs56124762, rs1892231, rs16901748, |
| | rs1326860, rs1541020, rs4942248, rs7759385 |
| Model_461 | rs6478109, rs56124762, rs1892231, rs16901748, |
| | rs12457255, rs2815844, rs10974900, rs2409750 |
| Model_462 | rs6478109, rs56124762, rs1892231, rs16901748, |
| | rs12457255, rs2815844, rs10974900, rs1541020 |
| Model_463 | rs6478109, rs56124762, rs1892231, rs16901748, |
| | rs12457255, rs2815844, rs10974900, rs4942248 |
| Model_464 | rs6478109, rs56124762, rs1892231, rs16901748, |
| | rs12457255, rs2815844, rs10974900, rs7759385 |
| Model_465 | rs6478109, rs56124762, rs1892231, rs16901748, |
| | rs12457255, rs2815844, rs2409750, rs1541020 |
| Model_466 | rs6478109, rs56124762, rs1892231, rs16901748, |
| | rs12457255, rs2815844, rs2409750, rs4942248 |
| Model_467 | rs6478109, rs56124762, rs1892231, rs16901748, |
| | rs12457255, rs2815844, rs2409750, rs7759385 |
| Model_468 | rs6478109, rs56124762, rs1892231, rs16901748, |
| | rs12457255, rs2815844, rs1541020, rs4942248 |
| Model_469 | rs6478109, rs56124762, rs1892231, rs16901748, |
| | rs12457255, rs2815844, rs1541020, rs7759385 |
| Model_470 | rs6478109, rs56124762, rs1892231, rs16901748, |
| | rs12457255, rs2815844, rs4942248, rs7759385 |
| Model_471 | rs6478109, rs56124762, rs1892231, rs16901748, |
| | rs12457255, rs10974900, rs2409750, rs1541020 |
| Model_472 | rs6478109, rs56124762, rs1892231, rs16901748, |
| | rs12457255, rs10974900, rs2409750, rs4942248 |
| Model_473 | rs6478109, rs56124762, rs1892231, rs16901748, |
| | rs12457255, rs10974900, rs2409750, rs7759385 |
| Model_474 | rs6478109, rs56124762, rs1892231, rs16901748, |
| | rs12457255, rs10974900, rs1541020, rs4942248 |
| Model_475 | rs6478109, rs56124762, rs1892231, rs16901748, |
| | rs12457255, rs10974900, rs1541020, rs7759385 |
| Model_476 | rs6478109, rs56124762, rs1892231, rs16901748, |
| | rs12457255, rs10974900, rs4942248, rs7759385 |
| Model_477 | rs6478109, rs56124762, rs1892231, rs16901748, |
| | rs12457255, rs2409750, rs1541020, rs4942248 |
| Model_478 | rs6478109, rs56124762, rs1892231, rs16901748, |
| | rs12457255, rs2409750, rs1541020, rs7759385 |
| Model_479 | rs6478109, rs56124762, rs1892231, rs16901748, |
| | rs12457255, rs2409750, rs4942248, rs7759385 |
| Model_480 | rs6478109, rs56124762, rs1892231, rs16901748, |
| | rs12457255, rs1541020, rs4942248, rs7759385 |
| Model_481 | rs6478109, rs56124762, rs1892231, rs16901748, |
| | rs2815844, rs10974900, rs2409750, rs1541020 |
| Model_482 | rs6478109, rs56124762, rs1892231, rs16901748, |
| | rs2815844, rs10974900, rs2409750, rs4942248 |
| Model_483 | rs6478109, rs56124762, rs1892231, rs16901748, |
| | rs2815844, rs10974900, rs2409750, rs7759385 |
| Model_484 | rs6478109, rs56124762, rs1892231, rs16901748, |
| | rs2815844, rs10974900, rs1541020, rs4942248 |
| Model_485 | rs6478109, rs56124762, rs1892231, rs16901748, |
| | rs2815844, rs10974900, rs1541020, rs7759385 |
| Model_486 | rs6478109, rs56124762, rs1892231, rs16901748, |
| | rs2815844, rs10974900, rs4942248, rs7759385 |
| Model_487 | rs6478109, rs56124762, rs1892231, rs16901748, |
| | rs2815844, rs2409750, rs1541020, rs4942248 |
| Model_488 | rs6478109, rs56124762, rs1892231, rs16901748, |
| | rs2815844, rs2409750, rs1541020, rs7759385 |
| Model_489 | rs6478109, rs56124762, rs1892231, rs16901748, |
| | rs2815844, rs2409750, rs4942248, rs7759385 |
| Model_490 | rs6478109, rs56124762, rs1892231, rs16901748, |
| | rs2815844, rs1541020, rs4942248, rs7759385 |
| Model_491 | rs6478109, rs56124762, rs1892231, rs16901748, |
| | rs10974900, rs2409750, rs1541020, rs4942248 |
| Model_492 | rs6478109, rs56124762, rs1892231, rs16901748, |
| | rs10974900, rs2409750, rs1541020, rs7759385 |
| Model_493 | rs6478109, rs56124762, rs1892231, rs16901748, |
| | rs10974900, rs2409750, rs4942248, rs7759385 |
| Model_494 | rs6478109, rs56124762, rs1892231, rs16901748, |
| | rs10974900, rs1541020, rs4942248, rs7759385 |
| Model_495 | rs6478109, rs56124762, rs1892231, rs16901748, |
| | rs2409750, rs1541020, rs4942248, rs7759385 |

### Example 20: A SNP Genotyping Assay

[1753] This assay is used to identify the 8 SNPs in the 8 SNP models of Example 19. DNA from a sample derived from a subject is combined with primers specific to each SNP, PCR reagents, a wildtype probe and a mutant probe. Wildtype probes are tagged with Hex at the 5′ end and quencher dye at the 3′ end. Mutant probes are tagged with FAM at the 5′ end and a quencher at the 3′ end.

[1754] For each SNP to be tested, 4 standard reactions are run: no template, homozygous wildtype, hetozygous, and homozygous mutant. Standard reactions use templates comprising a gblock comprising all 8 WT or mutant SNP sequences. For the heterozygous standard reaction the template comprises both the WT gblock and the mutant gblock.

[1755] Samples are run in duplicate. The reactions are run and analyzed using QuantStudioDx software to detect the genotypes of each sample. Genotypes are identified as homozygous wildtype, heterozygous, or homozygous mutant for each SNP and sample tested.

### Example 22: A Phase 2, Multi-Center, Double-Blind, Placebo-Controlled Study to Evaluate the CDx for Treatment with an Anti-TL1A Antibody in Subjects with Moderately to Severely Active Ulcerative Colitis

[1756] To validate the efficacy of the CDx treatment with anti-TL1A antibodies in ulcerative colitis (UC), a phase 2 clinical trial is conducted. The detailed design of the clinical trial protocol is provided in the protocol synopsis of Table 26 below and shown in FIGS. 11A-11B.

TABLE 26
PROTOCOL SYNOPSIS

| | |
|---|---|
| TITLE: | A Phase 2, Multi-Center, Double-Blind, Placebo-Controlled Study to |
| | Evaluate the CDx for Treatment with an Anti-TL1A Antibody in |
| | Subjects with Moderately to Severely Active Ulcerative Colitis |
| PROJECT PHASE: | Phase 2 |
| OBJECTIVE: | Primary: |
| | To assess the safety and tolerability of A219 following 12-weeks |
| | of induction therapy |
| | To compare the efficacy of A219 vs placebo for induction of |
| | clinical remission at Week 12 |
| | Secondary: |
| | All objectives below refer to comparison of A219-treated subjects |
| | vs placebo-treated subjects in Cohort 1. For the objectives where |
| | the companion diagnostic (CDx) status is a variable, a comparison |
| | of subjects in both Cohort 1 and Cohort 2 will be conducted. |
| | To compare the efficacy of A219 vs placebo for induction |
| | of endoscopic improvement at Week 12 |
| | To compare the efficacy of A219 vs placebo for induction of |
| | clinicalresponse at Week 12 |
| | To compare the efficacy of A219 vs placebo in CDx |
| | positive (CDx+) subjects (Cohort 1 + Cohort 2) for |
| | induction of clinical remission at Week 12 |
| | To compare the efficacy of A219 vs placebo for induction |
| | of histologic remission at Week 12 |
| | To compare the efficacy of A219 vs placebo for induction |
| | of histologic-endoscopic mucosal improvement at Week 12 |
| | To compare the efficacy of A219 vs placebo in CDx+ |
| | subjects (Cohort 1 + Cohort 2) for induction of endoscopic |
| | improvement at Week 12 |
| | To compare the efficacy of A219 vs placebo in CDx+ |
| | subjects (Cohort 1 + Cohort 2) for induction of clinical |
| | response at Week 12 |
| | To compare the efficacy of A219 vs placebo in CDx+ subjects |
| | (Cohort 1 + Cohort 2) for induction of histologic remission at |
| | Week 12 |
| | To compare the efficacy of A219 vs placebo in CDx+ subjects |
| | (Cohort 1 + Cohort 2) for induction of histologic-endoscopic |
| | mucosal improvement at Week 12 |
| | To compare the efficacy of A219 in CDx+ (Cohort 1 + Cohort 2) |
| | vs CDx negative (CDx−) subjects for induction of clinical |
| | remission at Week 12 |
| | To compare the efficacy of A219 vs placebo for induction |
| | of mucosal healing at Week 12 |
| | To compare the efficacy of A219 vs placebo in CDx+ |
| | subjects (Cohort 1 + Cohort 2) for induction of mucosal |
| | healing at Week 12 |
| | To compare the efficacy of A219 vs placebo for change in |
| | Inflammatory Bowel Disease Questionnaire (IBDQ) at |
| | Week 12 |
| | To compare the efficacy of A219 vs placebo in CDx+ |
| | subjects (Cohort 1 + Cohort 2) for change in IBDQ at Week 12 |
| | To compare the efficacy of A219 vs. placebo in subjects who |
| | are CDx+ per alternative algorithm (Cohort 1 + Cohort 2) for |
| | clinical remission at Week 12 |
| | Exploratory: |
| | To assess the pharmacokinetics (PK) of A219 in subjects |
| | with ulcerative colitis (UC) over time |
| | To assess the effects of A219 on tissue and serum |
| | pharmacodynamic (PD) markers, including total TL1A |
| | concentrations over time |
| | To assess the effect of A219 on inflammatory biomarkers |
| | includingfecal calprotectin and high sensitivity C-reactive protein |
| | (hsCRP) overtime |
| | To assess the proportion of subjects in 3-component Modified |
| | Mayo Score response, 3-component Modified Mayo Score |
| | remission, endoscopic improvement, Robarts histopathology |
| | index (RHI) histologic remission, Geboes score histologic |
| | remission, and mucosal healing at Week 50 |
| | To assess the change in Partial Mayo Score over time |
| | To assess the change in Geboes Index and RHI from |
| | Baseline to Week 12 and Week 50 |
| | To assess the exposure-response relationship of A219 on PD |
| | markers over time |
| | To assess the proportion of subjects achieving |
| | corticosteroid-free-remission at Week 50 |
| STUDY DESIGN: | This is a multi-center, double-blind, randomized, placebo-controlled |
| | proof of concept study designed to assess the safety, tolerability, and |
| | efficacy of A219 following 12 weeks of induction therapy in subjects |
| | with UC. This study will be conducted under the aegis of a Data |
| | Monitoring Committee (DMC) and will commence following the |
| | demonstration of an acceptable safety profile of A219 at a dose of |
| | ≥500 mg in the multiple ascending dose study in normal healthy |
| | volunteers (Example 16). |
| | The study has 4 periods (Screening Period, Induction Period [IP], |
| | Open-Label Extension [OLE] Period, and Follow-Up [FU] Period). |
| | The study will have 2 Cohorts that will enroll subjects in a sequential |
| | fashion utilizing an adaptive design as described below. |
| | Cohort 1: Following the Screening Period, approximately 120 |
| | eligible subjects with moderately to severely active UC will enter |
| | the IP and be randomized in a 1:1 fashion to receive intravenous |
| | (IV) administration of A219 1000 mg on Week 0/Day 1, followed |
| | by 500 mg on Weeks 2, 6, and 10, or placebo at the same |
| | timepoints. Randomization will be stratified by CDx status of |
| | positive (CDx+) or negative (CDx−) and prior biologic experience |
| | (yes/no) at Week 0/Day 1. Subjects who discontinue from the study |
| | will have a follow-up period of 12 weeks after last dose. |
| | Cohort 2: When approximately 80% of Cohort 1 subjects (i.e., ~96 |
| | subjects) have reached Week 12 or early terminated from the study, |
| | the DMC will conduct an unblinded analysis of clinical efficacy in |
| | CDx+ subjects and will recommend whether an expansion to Cohort |
| | 2 is warranted. The planned sample size for CDx+ subjects |
| | (combining Cohort 1 and Cohort 2) will be approximately 40, in the |
| | case where Cohort 2 is initiated. For Cohort 2, eligible subjects (who |
| | must be CDx+) will enter the IP and be randomized in a 1:1 fashion |
| | to receive IV administration of A219 1000 mg on |
| | Week 0/Day 1, followed by 500 mg on Weeks 2, 6, and 10, or |
| | placebo at the same timepoints. Randomization will be stratified by |
| | prior biologic experience (yes/no) at Baseline. Subjects who |
| | discontinue from the study will have a follow-up period of 12 |
| | weeks after last dose. |
| | Subjects who complete the 12-week IP from either Cohort will have |
| | the option to enter OLE. During OLE, starting at Week 14 visit: |
| | Subjects who have achieved deep remission (defined as in |
| | clinical remission [endoscopic subscore of 0 or 1, rectal bleeding |
| | subscore of 0, and stool frequency subscore of 0 or 1 and not |
| | greater than Baseline] and RHI <3) will continue in the study |
| | and have therapy withdrawal. |
| | Upon disease relapse (defined as rectal bleeding score of ≥1, |
| | and either hsCRP ≥5 and/or fecal calprotectin ≥250), |
| | subjects can receive another course of induction therapy |
| | (1000 mg IV followed by 500 mg IV 2, 6, and 10 weeks after |
| | the first infusion) followed by maintenance therapy of 250 |
| | mg IV every 4 weeks (Q4W) for a total of 50 weeks. |
| | Responders (defined as reduction from Baseline ≥2 points and |
| | >30% in 3-component Modified Mayo Score, accompanied by a |
| | reduction ≥1 in rectal bleeding subscore or absolute rectal |
| | bleeding subscore ≤1) who have not achieved deep remission |
| | will be re-randomized, stratifiedby CDx status of CDx+ or CDx−, |
| | to either 250 mg IV Q4W or 100 mg IV Q4W, starting at Week |
| | 14 until Week 50. |
| | Nonresponders will receive an open-label induction regimen of |
| | 1000 mg of A219 on Week 14, followed by 500 mg on Weeks |
| | 16, 20, and 24. Nonresponders who do not respond at Week 28 (per |
| | investigator discretion) should be discontinued from the study. |
| | Nonresponders who respond at Week 28 (per investigator |
| | discretion) will be re-randomized to either 250 mg IV Q4W or |
| | 100 mg IV Q4W, starting at Week 28 for a total of 50 weeks. |
| | The study may be amended by the Sponsor to extend the OLE |
| | period beyond 50 weeks based on emerging safety data. |
| | The study also includes an optional PK sub-study during the IP for |
| | subjects who consent to additional PK sampling. |
| SAMPLE SIZE: | The study is planned to randomize up to approximately 170 |
| | subjects, approximately 120 in Cohort 1 and up to 50 in Cohort 2. |
| | A sample size of 60 per arm in Cohort 1 will enable a statistical |
| | power of >80% for the primary endpoint at 1-sided significance |
| | level of 0.025 using Cochran- Mantel-Haenszel (CMH), assuming |
| | clinical remission rate of 5% for placebo and 24% for A219. |
| | Additionally, the sample size will confer >80% power to |
| | achieve statistical significance for the 1^{st} secondary |
| | endpoint of endoscopic improvement with an overall 1-sided alpha |
| | level of 0.025, assuming the endoscopic improvement rates are 15% |
| | and 38% for placebo and A219 groups, respectively. |
| | Additionally, for analyses of the CDx population (combining CDx+ |
| | subjects from Cohort 1 and Cohort 2), a sample size of 40 per arm |
| | will provide a statistical power of ≥80% at a 1-sided alpha level of |
| | 0.025, according to a group sequential design with a non-binding |
| | futility interim analysis when 18 subjects per arm reach Week 12, |
| | assuming clinical remission rate of 5% for placebo and 31% for |
| | A219. |
| SUBJECT TYPE: | Male or female subjects ≥18 years of age with moderately to |
| | severely active UC. |
| FORMULATIONS: | A219 will be supplied in 10 ml vials each containing 500 mg A219 |
| | (60 mg/mL solution) for IV administration after reconstitution. |
| DOSAGE: | Subjects will be stratified by CDx+/CDx− status and prior biologic |
| | A219 1000 mg IV on Week 0/Day 1, followed by 500 mg IV |
| | on Weeks 2, 6, and 10 |
| | Placebo IV on Week 0/Day 1, followed by placebo IV on |
| | Weeks 2, 6, and 10 |
| | During OLE: |
| | Deep remitters will enter the therapy withdrawal period |
| | All subjects who develop disease relapse after therapy |
| | withdrawal will receive another course of induction therapy |
| | (1000 mg IV followed by 500 mg IV 2, 6, and 10 weeks after |
| | the first infusion) followed by maintenance therapy of 250 mg |
| | IV Q4W for a total of 50weeks. |
| | Respondersat the end of Week 12 will be stratified by CDx |
| | status of CDx+ or CDx− and re-randomized to receive one of |
| | the following regimens: |
| | A219 250 mg IV on Week 14 then Q4W until Week 50 |
| | A219 100 mg IV on Week 14 then Q4W until Week 50 |
| | experience (yes/no) in a 1:1 ratio to: |
| | Nonresponders at the end of Week 12 will receive open-label |
| | A219 1000 mg IV on Week 14, followed by A219 500 mg IV on |
| | Weeks 16, 20, and 24. Subjects who do not respond by Week 26 |
| | should be discontinued from the study. Subjects who respond by |
| | Week 26 will be stratified by CDx status of CDx+ or CDx− and |
| | re-randomized to receiveone of the following regimens: |
| | A219 250 mg IV on Week 28 then Q4W for a total of 50 weeks |
| | A219 100 mg IV on Week 28 then Q4W for a total of 50 weeks |
| ROUTE OF | All study drug will be reconstituted in 250 mL of 0.9% normal |
| ADMINISTRATION: | saline (NS) and will be administered IV over 30 minutes. |
| STUDY ENDPOINTS: | Primary endpoints: |
| | The proportion of subjects reporting adverse events (AEs), |
| | serious adverse events (SAEs), AEs leading to discontinuation, |
| | and markedly abnormal laboratory values. |
| | The proportion of subjects in the 3-component Modified Mayo |
| | Score clinical remission (as defined by endoscopic subscore of 0 |
| | or 1, rectal bleeding subscore of 0, and stool frequency subscore |
| | of 0 or 1 and not greater than Baseline) at Week 12. The 3- |
| | component Modified Mayo Score ranges from 0-9 and includes |
| | rectal bleeding, stool frequency and endoscopic assessment |
| | domains. |
| | Secondary endpoints: |
| | The proportion of subjects with endoscopic improvement, as |
| | defined byendoscopy subscore ≤1 with no friability) at Week 12. |
| | The proportion of subjects in 3-component Modified Mayo Score |
| | clinical response at Week 12. The 3-component Modified Mayo |
| | Score clinical response is defined by reduction from Baseline ≥2 |
| | points and ≥30% in 3-component Modified Mayo Score, |
| | accompanied by a reduction ≥1 in rectal bleeding subscore or |
| | absolute rectal bleeding subscore ≤1. |
| | The proportion of subjects in the 3-component Modified Mayo |
| | Score clinical remission (as defined by endoscopic subscore of 0 |
| | or 1, rectal bleeding subscore of 0, and stool frequency subscore |
| | of 0 or 1 and not greater than Baseline), in CDx+ subjects (Cohort |
| | 1 + Cohort 2) treated with A219 compared to CDx+ placebo- |
| | treated subjects at Week 12. The 3-component Modified Mayo |
| | Score ranges from 0-9 and includes rectal bleeding, stool |
| | frequency, and endoscopic assessment domains. |
| | The proportion of subjects with histologic remission (defined |
| | Geboes score ≤3.1) at Week 12. |
| | The proportion of subjects with histologic-endoscopic mucosal |
| | improvement (defined as Geboes score ≤3.1 and endoscopy |
| | subscore ≤1 with no friability) at Week 12. |
| | The proportion of subjects with endoscopic improvement, as |
| | defined by endoscopy subscore ≤1 with no friability, in CDx+ |
| | subjects (Cohort 1 + Cohort 2) treated with A219 compared to |
| | CDx+ placebo-treated subjects at Week 12. |
| | The proportion of subjects in 3-component Modified Mayo Score |
| | clinical response in CDx+ subjects treated with A219 compared |
| | to CDx+ placebo-treated subjects at Week 12. The 3-component |
| | Modified Mayo Score clinical response is defined by reduction |
| | from Baseline ≥2 points and ≥30% in 3-component Modified |
| | Mayo Score, accompanied by a reduction ≥ 1 in rectal bleeding |
| | subscore or absolute rectal bleeding subscore ≤ 1. |
| | The proportion of subjects with histologic remission, defined as |
| | Geboes score ≤3.1, in CDx+ subjects (Cohort 1 +Cohort 2) |
| | treated with A219 compared to CDx+ placebo-treated subjects at |
| | Week 12. |
| | The proportion of subjects with histologic-endoscopic mucosal |
| | improvement (defined as Geboes score ≤3.1 and endoscopy |
| | subscore <1 with no friability), in CDx+ subjects (Cohort 1 + |
| | Cohort 2) treated with A219 compared to CDx+ placebo-treated |
| | subjects at Week 12. |
| | The proportion of subjects with clinical remission (defined as |
| | endoscopic subscore of 0 or 1, rectal bleeding subscore of 0, |
| | and stool frequency subscore of 0 or 1 and not greater than |
| | Baseline) in CDx+ subjects (Cohort 1 + Cohort 2) treated with |
| | A219 compared to in CDx− subjects treated with A219 at Week 12. |
| | The proportion of subjects with mucosal healing (defined as |
| | Geboes score ≤2B.1 and endoscopy subscore of ≤1) at Week 12. |
| | The proportion of subjects with mucosal healing (defined as |
| | Geboes score ≤2B.1 and endoscopy subscore of ≤1), in CDx+ |
| | subjects (Cohort 1 + Cohort 2) treated with A219 compared to |
| | CDx+ placebo-treated subjects at Week 12. |
| | The proportion of subjects with IBDQ response, as defined by |
| | ≥16-point increase from Baseline at Week 12. |
| | The proportion of subjects with IBDQ response, as defined by |
| | ≥16-point increase from Baseline, in CDx+ subjects (Cohort 1 + |
| | Cohort 2) treated with A219 compared to CDx+ placebo- |
| | treated subjects at Week 12. |
| | The proportion of subjects in the 3-component Modified Mayo |
| | Score clinical remission (as defined by endoscopic subscore of |
| | 0 or 1, rectal bleeding subscore of 0, and stool frequency |
| | subscore of 0 or 1 and not greater than Baseline), in CDx+ |
| | subjects per alternative algorithm (Cohort 1 + Cohort 2) treated |
| | with A219 compared to CDx+ |
| | placebo-treated subjects per alternative algorithm at Week 12. |
| | The 3-component Modified Mayo Score ranges from 0-9 and |
| | includes rectal bleeding, stool frequency, and endoscopic |
| | assessment domains. |
| | Exploratory endpoints: |
| | The pharmacokinetics of A219 in subjects with UC after |
| | multiple doses |
| | The change from Baseline in serum and fecal inflammatory |
| | biomarkers (PD markers) |
| | The proportion of subjects in 3-component Modified Mayo |
| | Score response, 3-component Modified Mayo Score |
| | remission, endoscopic improvement, RHI histologic remission, |
| | Geboes score histologic remission, and mucosal healing at |
| | Week 50 |
| | The change in Partial Mayo Score (with or without PGA |
| | component) over time |
| | The change in Geboes Index and RHI from Baseline to Week |
| | 12 and Week 50 |
| | The exposure-response relationship of A219 on PD markers |
| | Within subpopulation of subjects on corticosteroid at study |
| | entry, the proportion of subjects in clinical remission and off of |
| | corticosteroid at Week 50 |
| INCLUSION | Subjects are required to meet the following criteria in order to be |
| CRITERIA: | included in the study: |
| | 1. Male or female ≥18 yearsof age. |
| | 2. Subjects must have had a documented diagnosis of UC |
| | (endoscopy + histology) to be eligible for study participation. |
| | For subjects with no documented confirmation of UC |
| | diagnosis or if previous diagnosis is not deemed conclusive, |
| | UC diagnosis must be confirmed at time of screening |
| | colonoscopy. |
| | 3. Moderately to severely active UC as defined by 3-component |
| | Modified Mayo score (3 components of rectal bleeding, stool |
| | frequency, and endoscopy) of 4 to 9, inclusive, with Modified |
| | Mayo endoscopic subscore ≥2 and rectal bleeding subscore ≥1. |
| | 4. Subjects must satisfy at least one of the following criteria: |
| | a) In the past, had an inadequate response to one or more of |
| | the following treatments: |
| | Oral prednisone ≥40 mg/day (or equivalent) or budesonide |
| | ≥9 mg/day or equivalent or beclomethasone ≥5 mg/day |
| | for at least 2 weeks |
| | Corticosteroid dependence as defined by failed to |
| | successfully taper to <10 mg/day of prednisone or |
| | equivalent (i.e., had a flare of disease) within 3 months of |
| | starting therapy, or if relapse occurswithin 3 months of |
| | stopping corticosteroids |
| | Immunosuppressants (azathioprine ≥2 mg/kg/day or |
| | 6-mercaptopurine ≥1.0 mg/kg/day [or documentation |
| | of a therapeutic concentration of 6-thioguanine |
| | nucleotide]) for atleast 8 weeks |
| | An approved anti-TNF agent at an approved labeled dose |
| | for atleast 8 weeks |
| | Vedolizumab at the approved labelled dose for at least 8 weeks |
| | An approved JAK inhibitor (e.g., tofacitinib) at an |
| | approved labelled dose for at least 8 weeks |
| | An approved anti-IL-12/23 (e.g., ustekinumab) at an |
| | approved labelled dose for at least 8 weeks |
| | An approved sphingosine 1-phosphate receptor (S1PR) |
| | modulator at an approved labelled dose for least 12 weeks |
| | OR |
| | b) Had been intolerant to one or more of the above-mentioned |
| | treatments (e.g., unable to achieve doses or treatment |
| | durations because of dose limiting side effects [e.g., leukopenia, |
| | psychosis, un controlled diabetes, elevated liver enzymes]). |
| | OR |
| | c) Currently receiving one or more of the following treatments: |
| | Oral Prednisone □ 10 mg/day (or equivalent) for at least 3 months |
| | Immunosuppressants [azathioprine ≥2 mg/kg/day or |
| | 6-mercaptopurine □ 1.0 mg/kg/day (or documentation |
| | of a therapeutic concentration of 6-thioguanine |
| | nucleotide)] for at least 8 weeks. |
| | Notes on subjects who have had prior biologic/biologic-like |
| | therapy(ies) (anti-TNF, JAK inhibitor, S1PR modulator, anti-IL- |
| | 12/23, and/or vedolizumab): |
| | The study will include a maximum of 70% subjects who have |
| | had prior biologic/biologic-like therapy(ies) experience. |
| | Upon reaching the maximum number of allowed |
| | biologic/biologic-like experienced subjects (70%), subjects |
| | who have had prior biologic/biologic-like experience will no |
| | longer be allowed to enter the study. |
| | Subject cannot have failed (no response, insufficient |
| | response, loss of response, and/or intolerance) >3 classes or |
| | >4 individual biologic/biologic-like therapies (refer to |
| | exclusion criterion #26). |
| | 5. For subjects who are women of childbearing potential |
| | (WOCBP) involved in any sexual intercourse that could lead to |
| | pregnancy, the subject has used two highly effective methods |
| | of contraception for atleast 4 weeks prior to Day 1 and agrees |
| | to continue to use two highly |
| | effective methods of contraception until at least 12 weeks after |
| | the last dose of study drug. |
| | 6. Male subjects must use, with their female partner of |
| | childbearing potential, two highly effective methods of |
| | contraception and refrain from sperm donation from screening |
| | to 12 weeks after the last dose of study drug. |
| | 7. Subject must meet drug stabilization requirements, as applicable: |
| | a) Oral corticosteroid treatment must be equivalent of ≤20 mg |
| | prednisone or ≤9 mg budesonide or beclomethasone ≤5 mg |
| | daily at a stable dose for at least 2 weeks prior to randomization |
| | b) Oral aminosalicylates should be at a stable dose for at least 2 |
| | weeks prior to randomization |
| | c) Azathioprine and 6-mercaptopurine should be at a stable dose |
| | for at least 4 weeks prior to randomization |
| | 8. Able to provide written informed consent and understand and |
| | comply with the requirements of the study. |
| | 9. For Cohort 2 only: Subjects must be CDx+. |
| EXCLUSION | Subjects with the following characteristics will be excluded from |
| CRITERIA: | the study: |
| | Sex and Reproductive Status |
| | 1. WOCBP and men with female partnersof childbearing potential |
| | who are unwilling or unable to use two highly effective methods |
| | of contraception to avoid pregnancy for the entire study period |
| | and for upto 12 weeks after the last dose of study drug. |
| | 2. Women who are pregnant or breastfeeding. |
| | 3. Women with a positive pregnancy test on enrollment or |
| | prior to randomization. |
| | Target Disease Exceptions |
| | 4. Diagnosis of Crohn's disease or indeterminate colitis. |
| | 5. UC limited to the rectum (<15 cm from anal verge). |
| | 6. Current evidence of fulminant colitis, toxic megacolon, or |
| | bowel perforation. |
| | 7. Current or impending need for colostomy or ileostomy. |
| | 8. Previous total proctocolectomy or partial colectomy. |
| | 9. Surgical bowel resection within 3 months before screening. |
| | 10. Concomitant primary sclerosing cholangitis (PSC) |
| | Medical History and Concurrent Diseases |
| | 11. Past or current evidence of definite low-grade or high-grade |
| | colonic dysplasia that has not been completely removed. |
| | 12. Subjects who are scheduled or anticipate the need for surgery, |
| | aside from dermatologic procedures. |
| | 13. Subjects who have a history of clinically significant drug or |
| | alcohol abuse. |
| | 14. Concomitant illness that in the opinion of the Investigator, is |
| | likely to require systemic glucocorticosteroid therapy during the |
| | study (e.g., moderate to severe asthma). |
| | 15. Current symptoms of severe, progressive, or uncontrolled |
| | renal, hepatic, hematological, pulmonary, cardiac, |
| | neurological, ophthalmologic or cerebral disease. Concomitant |
| | medical conditions that in the opinion of the Investigator might |
| | place the subject at unacceptable risk for participation in this study. |
| | 16. Subjects with a history of cancer within the last 5 years(other |
| | than non-melanoma skin cell cancerscured by local resection). |
| | Existing non-melanoma skin cell cancersmust be removed |
| | prior to enrollment. Subjects with carcinoma in situ or localized |
| | cervical cancer, treated with definitive surgical intervention, are |
| | allowed. |
| | 17. Subjects at risk for tuberculosis (TB). Specifically, subjects with: |
| | a) A history of active TB |
| | b) Current clinical, radiographic or laboratory evidence of active TB |
| | c) Latent TB which was not successfully treated. Subjects with |
| | a positive TB screening test indicative of latent TB will not |
| | be eligible for the study unless active TB infection has been |
| | ruled out, and an appropriate course of intervention for latent |
| | TB has been initiated at least 2 weeks prior to randomization, |
| | and no evidence of active TB on chest x-ray during Screening. |
| | 18. Subjects with any serious bacterial infection within the last 3 |
| | months, unless treated and resolved with antibiotics, or any |
| | chronic bacterial infection (such as chronic pyelonephritis, |
| | osteomyelitis and bronchiectasis). |
| | 19. Female subjects who have had a breast cancer screening that is |
| | suspicious for malignancy, and in whom the possibility of |
| | malignancy cannot be reasonably excluded following additional |
| | clinical, laboratory or other diagnostic evaluations. |
| | 20. Subjects with any active infections (excluding fungal infections |
| | of nailbeds) including, but not limited to, those that require |
| | intravenous (IV) antimicrobial treatment 4 weeks or oral |
| | antimicrobial treatment 2 weeks prior to randomization. |
| | Subjects with evidence of Human Immunodeficiency Virus |
| | (HIV), Hepatitis B or Hepatitis C infection detected during |
| | screening are also excluded, but subjects with successfully |
| | treated Hepatitis C with no recurrence for ≥ 1 year are allowed. |
| | Subjects with active documented or suspected COVID-19 |
| | infection within 4 weeks of randomization or asymptomatic |
| | SARS-COV-2 PCR test within 2 weeks of randomization are |
| | excluded. |
| | 21. Subjects with herpes zoster reactivation or cytomegalovirus |
| | (CMV) that resolved less than 2 months prior to signing |
| | informed consent. |
| | 22. Subjects who have received any live vaccines within 3 months |
| | of the anticipated first dose of study medication or who will have |
| | need of a live vaccine at any time during the study. |
| | Physical and Laboratory Test Findings |
| | 23. Positive stool Polymerase Chain Reaction (PCR) or culture for |
| | enteric pathogens. |
| | 24. Stool positive for Clostridium difficile (C. difficile) toxin. |
| | Subjects who are positive can be retested after the completion |
| | of a full course of treatment for C. difficile infection. |
| | 25. Any of the following lab values: |
| | a) Hemoglobin (Hgb) <8.0 g/dL (80 g/L) |
| | b) White blood cell (WBC) <2,500/mm³ (2.5 ×10⁹/L) |
| | c) Neutrophils <1,000/mm³ (1 × 10⁹/L) |
| | d) Platelets <100,000/mm³ (100 × 10⁹/L) |
| | e) Serum creatinine >2 times upper limit of normal (ULN) |
| | f) Serum alanine aminotransferase (ALT) or |
| | aspartate aminotransferase (AST) >2 times ULN |
| | g) Any other laboratory test results that, in the opinion of |
| | the Investigator, might place the subject at |
| | unacceptable risk forparticipation in this study |
| | Prohibited Therapies and/or Medications |
| | 26. Failed (no response, insufficient response, loss of response, |
| | and/or intolerance) >3 classes (anti-TNF, anti-integrin, anti- |
| | IL12/23, JAK inhibitor, S1PR modulator) or >4 individual |
| | biologic/biologic-like therapies. |
| | 27. Any marketed biologic or biologic-like within 2 weeks for |
| | tofacitinib, 8 weeks for anti-TNF agents, 10 weeks for S1PR |
| | modulators, and 12 weeks for vedolizumab and ustekinumab |
| | prior to randomization or if drug level per therapeutic dose |
| | monitoring is greater than lower limit of detection. |
| | 28. Any biologic immunomodulators not covered in exclusion |
| | criterion 27, used for UC or other conditions within 8 weeks or 5 |
| | half-lives, whichever is longer, prior to randomization or if drug |
| | level per therapeutic dose monitoring is greater than lower limit |
| | of detection. |
| | 29. Rituximab within 1 year prior to randomization. |
| | 30. Parenteral corticosteroids within 4 weeks or rectal |
| | administration of corticosteroids within 2 weeks prior to |
| | randomization. |
| | 31. Rectal administration of 5-ASA within 2 weeks prior to |
| | randomization. |
| | 32. Tacrolimus, methotrexate, cyclosporine, mycophenolate mofetil |
| | (CellCept ®), immunoadsorption columns (such as Prosorba |
| | columns), D Penicillamine, Leflunomide, Thalidomide, fish-oil |
| | preparations, probiotics, fecal transplantation, non-steroidal anti- |
| | inflammatory agents(NSAIDs), aspirin >81 mg/day within 2 |
| | weeks prior to randomization. |
| | 33. Other investigational chemical agent within 30 days or other |
| | investigational biologic agent within 8 weeks or 5 half -lives |
| | (whichever is longer) of randomization. |
| | 34. Prior exposure to A219. |
| | Other Exclusion Criteria |
| | 35. Prisonersor subjects who are compulsorily detained |
| | (involuntarily incarcerated) for treatment of either a |
| | psychiatric or physical (e.g., infectious disease) illness must |
| | not be enrolled into this study. |
| | 36. Legal or mental incapacitation, or inability to understand and |
| | comply with the requirements of the study. |
| Statistical Methods: | Statistical methods will be detailed in the Statistical Analysis Plan. |
| | The SAP will provide details about the method of analysis and |
| | specific plannedanalyses, and will be prepared and approved by |
| | Prometheus Biosciences and its designees before study database |
| | lock and unblinding of subject treatment assignments. |
| | The analysis populations are defined as follows: |
| | Full analysis set (FAS) from Cohort 1: all subjects |
| | randomized andtreated in Cohort 1 |
| | FAS for CDx+: all CDx+ subjects who are randomized and |
| | treated in both Cohort 1 and Cohort 2 |
| | Safety analysis set: all subjects treated |
| | The following analyses will be performed: |
| | Efficacy: |
| | The efficacy assessment will test for the difference between A219 |
| | and placebo groups in FAS. |
| | The primary endpoint will be analyzed and compared between |
| | A219 and placebo treatment groups in FAS from Cohort 1. The |
| | primary endpoint, the proportion of subjects achieving clinical |
| | remission, will be tested between the 2 treatment groups at 1-sided |
| | significance level of 0.025 using CMH with stratification factors at |
| | randomization. If significant, the 1^{st} secondary endpoint of |
| | proportion of subjects achieving endoscopic improvement will be |
| | tested between the 2 treatment groups at 1-sided significance level |
| | of 0.025. If significant, the 2^{nd}, 3^{rd}, 4^{th}, and 5^{th} secondary endpoints |
| | will be tested sequentially, each at 1-sided significance level of |
| | 0.025. Testing for statistical significance will stop when the first |
| | endpoint is not statistically significant at level of 0.025 and all |
| | remaining p values will be nominal. |
| | Treatment difference for primary and secondary endpoints for Cohort |
| | 1 will be estimated along with 95% CI for all subjects in FAS. The |
| | secondary endpoints in CDx+ subjects will be summarized and |
| | compared between A219 and placebo groups in FAS for CDx+, |
| | while the treatment difference will be estimated with 95% CI. |
| | Additional efficacy analysis will be detailed in SAP. |
| | Interim Efficacy Analysis: |
| | An interim analysis will be carried out when approximately 80% of |
| | subjects (approximately 96 subjects) in Cohort 1 have reached |
| | Week 12 orearly terminated from the study. The DMC will review |
| | the unblinded efficacy and safety data and recommend on the |
| | expansion to Cohort 2. |
| | Decision rules to initiate Cohort 2 are determined according to the |
| | futility bounds of group sequential design of a sample size of 40 per |
| | arm with one interim analysis at the information fraction of 45%. |
| | Because the exact bounds will be calculated using the actual number |
| | of subjects with CDx+ included in the interim analysis, the final |
| | decision rules, along with sensitivity analysis, will be specified in |
| | the DMC SAP, prior to the interim analysis. |
| | Adverse Events: |
| | AEs will be coded using the most current version of Medical |
| | Dictionary for Regulatory Activities (MedDRA^{\| \|}). |
| | A by-subject AE data listing, including verbatim term, preferred |
| | term (PT), system organ class (SOC), treatment, severity, seriousness |
| | criteria, relationship to drug, and action taken, will be provided. |
| | The number of subjects experiencing treatment-emergent adverse |
| | events(TEAEs) and number of TEAEs will be summarized by |
| | treatment using frequency counts for Safety analysis set. |
| | Medical History, chest x-ray, electrocardiogram (ECG), and |
| | physical examination will be listed by subject. |
| | Changes in ECGs and physical examinations will be described in the |
| | text of the final report. |
| | Concomitant Medications: |
| | Concomitant medications will be coded using the most current |
| | World Health Organization (WHO) drug dictionary and listed |
| | by treatment. |
| | Pharmacokinetics: |
| | Summary statistics of A219 concentrations and anti-drug antibody |
| | (ADA) by visit and by CDx+ and CDx−. |

[1757] While preferred embodiments of the present invention have been shown and described herein, it will be obvious to those skilled in the art that such embodiments are provided by way of example only. Numerous variations, changes, and substitutions will now occur to those skilled in the art without departing from the invention. It should be understood that various alternatives to the embodiments of the invention described herein may be employed in practicing the invention. It is intended that the following claims define the scope of the invention and that methods and structures within the scope of these claims and their equivalents be covered thereby.

The application's sequence listing, which the Patent Office published only in electronic form, follows.

SEQUENCE LISTING (364158 sequences)

SEQ ID NO: 1 - protein, 10 aa, synthetic construct
  REGION 1..10: note = Description of Artificial Sequence: Synthetic peptide
GFDIQDTYMH

SEQ ID NO: 2 - protein, 17 aa, synthetic construct
  REGION 1..17: note = Description of Artificial Sequence: Synthetic peptide
RIDPASGHTKYDPKFQV

SEQ ID NO: 3 - protein, 17 aa, synthetic construct
  REGION 1..17: note = Description of Artificial Sequence: Synthetic peptide
RIEPASGHIKYDPKFQG

SEQ ID NO: 4 - protein, 17 aa, synthetic construct
  REGION 1..17: note = Description of Artificial Sequence: Synthetic peptide
RIDPASGHIKYDPKFQG

SEQ ID NO: 5 - protein, 17 aa, synthetic construct
  REGION 1..17: note = Description of Artificial Sequence: Synthetic peptide
RIEPASGHIKYDPKFQV

SEQ ID NO: 6 - protein, 7 aa, synthetic construct
  REGION 1..7: note = Description of Artificial Sequence: Synthetic peptide
SGGLPDV

SEQ ID NO: 7 - protein, 9 aa, synthetic construct
  REGION 1..9: note = Description of Artificial Sequence: Synthetic peptide
ARSGGLPDV

SEQ ID NO: 8 - protein, 7 aa, synthetic construct
  REGION 1..7: note = Description of Artificial Sequence: Synthetic peptide
SGGLPDW

SEQ ID NO: 9 - protein, 9 aa, synthetic construct
  REGION 1..9: note = Description of Artificial Sequence: Synthetic peptide
ARSGGLPDW

SEQ ID NO: 10 - protein, 10 aa, synthetic construct
  REGION 1..10: note = Description of Artificial Sequence: Synthetic peptide
RASSSVSYMY

SEQ ID NO: 11 - protein, 7 aa, synthetic construct
  REGION 1..7: note = Description of Artificial Sequence: Synthetic peptide
ATSNLAS

SEQ ID NO: 12 - protein, 9 aa, synthetic construct
  REGION 1..9: note = Description of Artificial Sequence: Synthetic peptide
QQWEGNPRT

SEQ ID NO: 13 - protein, 9 aa, synthetic construct
  REGION 1..9: note = Description of Artificial Sequence: Synthetic peptide
QQWKGNPRT

SEQ ID NO: 14 - protein, 9 aa, synthetic construct
  REGION 1..9: note = Description of Artificial Sequence: Synthetic peptide
QQWSGNPRT

SEQ ID NO: 15 - protein, 9 aa, synthetic construct
  REGION 1..9: note = Description of Artificial Sequence: Synthetic peptide
QQWSRNPRT

SEQ ID NO: 16-100 - skipped (85 entries)

SEQ ID NO: 101 - protein, 116 aa, synthetic construct
  REGION 1..116: note = Description of Artificial Sequence: Synthetic polypeptide
QVQLVQSGAEVKKPGASVKVSCKASGFDIQDTYMHWVKQRPGQGLEWMGRIDPASGHTKYDPKFQVRVTITRDTSTSTVYMELSSLRSEDTAVYYCARSGGLPDVWGQGTTVTVSS

SEQ ID NO: 102 - protein, 116 aa, synthetic construct
  REGION 1..116: note = Description of Artificial Sequence: Synthetic polypeptide
QVQLVQSGAEVKKPGASVKVSCKASGFDIQDTYMHWVKQRPGQGLEWMGRIDPASGHTKYDPKFQVRVTMTRDTSTSTAYLELSSLRSEDTAVYYCARSGGLPDVWGQGTTVTVSS

SEQ ID NO: 103 - protein, 116 aa, synthetic construct
  REGION 1..116: note = Description of Artificial Sequence: Synthetic polypeptide
EVQLVQSGAEVKKPGASVKVSCKASGFDIQDTYMHWVRQRPGQGLEWIGRIDPASGHTKYDPKFQVRATITTDTSTSTAYLELSSLRSEDTAVYYCARSGGLPDVWGQGTTVTVSS

SEQ ID NO: 104 - protein, 116 aa, synthetic construct
  REGION 1..116: note = Description of Artificial Sequence: Synthetic polypeptide
QVQLVQSGAEVKKPGASVKVSCKASGFDIQDTYMHWVKQRPGQGLEWMGRIDPASGHTKYDPKFQVRVTITRDTSTSTVYLELSSLRSEDTAVYYCARSGGLPDVWGQGTTVTVSS

SEQ ID NO: 105 - protein, 116 aa, synthetic construct
  REGION 1..116: note = Description of Artificial Sequence: Synthetic polypeptide
QVQLVQSGAEVKKPGASVKVSCKASGFDIQDTYMHWVKQRPGQGLEWMGRIDPASGHTKYDPKFQVRATITRDTSTSTAYLELSSLRSEDTAVYYCARSGGLPDVWGQGTTVTVSS

SEQ ID NO: 106 - protein, 116 aa, synthetic construct
  REGION 1..116: note = Description of Artificial Sequence: Synthetic polypeptide
QVQLVQSGAEVKKPGASVKVSCKASGFDIQDTYMHWVRQRPGQGLEWMGRIDPASGHTKYDPKFQVRVTITTDTSTSTVYMELSSLRSEDTAVYYCARSGGLPDVWGQGTTVTVSS

SEQ ID NO: 107 - protein, 116 aa, synthetic construct
  REGION 1..116: note = Description of Artificial Sequence: Synthetic polypeptide
QVQLVQSGAEVKKPGASVKVSCKASGFDIQDTYMHWVRQRPGQGLEWIGRIDPASGHTKYDPKFQVRATITTDTSTSTAYLELSSLRSEDTAVYYCARSGGLPDVWGQGTTVTVSS

SEQ ID NO: 108 - protein, 116 aa, synthetic construct
  REGION 1..116: note = Description of Artificial Sequence: Synthetic polypeptide
QVQLVQSGAEVKKPGASVKVSCKASGFDIQDTYMHWVKQRPGQGLEWIGRIDPASGHTKYDPKFQVRATITTDTSTSTAYLELSSLRSEDTAVYYCARSGGLPDVWGQGTTVTVSS

SEQ ID NO: 109 - protein, 116 aa, synthetic construct
  REGION 1..116: note = Description of Artificial Sequence: Synthetic polypeptide
EVQLVQSGAEVKKPGASVKVSCKASGFDIQDTYMHWVKQRPGQGLEWIGRIDPASGHTKYDPKFQVRATITTDTSTSTAYLELSSLRSEDTAVYYCARSGGLPDVWGQGTTVTVSS

SEQ ID NO: 110 - protein, 116 aa, synthetic construct
  REGION 1..116: note = Description of Artificial Sequence: Synthetic polypeptide
QVQLVQSGAEVKKPGASVKVSCKASGFDIQDTYMHWVRQRPGQGLEWMGRIDPASGHTKYDPKFQVRVTITTDTSTSTAYLELSSLRSEDTAVYYCARSGGLPDVWGQGTTVTVSS

SEQ ID NO: 111 - protein, 116 aa, synthetic construct
  REGION 1..116: note = Description of Artificial Sequence: Synthetic polypeptide
QVQLVQSGAEVKKPGASVKVSCKASGFDIQDTYMHWVRQRPGQGLEWMGRIDPASGHTKYDPKFQVRVTITRDTSTSTAYLELSSLRSEDTAVYYCARSGGLPDVWGQGTTVTVSS

SEQ ID NO: 112 - protein, 116 aa, synthetic construct
  REGION 1..116: note = Description of Artificial Sequence: Synthetic polypeptide
QVQLVQSGAEVKKPGASVKVSCKASGFDIQDTYMHWVRQRPGQGLEWIGRIDPASGHTKYDPKFQVRVTITRDTSTSTAYLELSSLRSEDTAVYYCARSGGLPDVWGQGTTVTVSS

SEQ ID NO: 113 - protein, 116 aa, synthetic construct
  REGION 1..116: note = Description of Artificial Sequence: Synthetic polypeptide
QVQLVQSGAEVKKPGASVKVSCKASGFDIQDTYMHWVRQRPGQGLEWIGRIDPASGHTKYDPKFQVRATITRDTSTSTAYLELSSLRSEDTAVYYCARSGGLPDVWGQGTTVTVSS

SEQ ID NO: 114 - protein, 116 aa, synthetic construct
  REGION 1..116: note = Description of Artificial Sequence: Synthetic polypeptide
QVQLVQSGAEVKKPGASVKVSCKASGFDIQDTYMHWVKQRPGQGLEWMGRIDPASGHTKYDPKFQVRVTITRDTSTSTAYLELSSLRSEDTAVYYCARSGGLPDVWGQGTTVTVSS

SEQ ID NO: 115 - protein, 116 aa, synthetic construct
  REGION 1..116: note = Description of Artificial Sequence: Synthetic polypeptide
QVQLVQSGAEVKKPGASVKVSCKASGFDIQDTYMHWVKQRPGQGLEWIGRIDPASGHTKYDPKFQVRVTITTDTSTSTAYLELSSLRSEDTAVYYCARSGGLPDVWGQGTTVTVSS

SEQ ID NO: 116 - protein, 116 aa, synthetic construct
  REGION 1..116: note = Description of Artificial Sequence: Synthetic polypeptide
EVQLVQSGAEVKKPGASVKVSCKASGFDIQDTYMHWVKQAPGQGLEWMGRIEPASGHIKYDPKFQGRVTMTRDTSTSTVYMELSSLRSEDTAVYYCARSGGLPDWWGQGTTVTVSS

SEQ ID NO: 117 - protein, 116 aa, synthetic construct
  REGION 1..116: note = Description of Artificial Sequence: Synthetic polypeptide
QVQLVQSGAEVKKPGASVKVSCKASGFDIQDTYMHWVKQRPGQGLEWMGRIEPASGHIKYDPKFQGRVTMTRDTSTSTVYMELSSLRSEDTAVYYCARSGGLPDWWGQGTTVTVSS

SEQ ID NO: 118 - protein, 116 aa, synthetic construct
  REGION 1..116: note = Description of Artificial Sequence: Synthetic polypeptide
QVQLVQSGAEVKKPGASVKVSCKASGFDIQDTYMHWVKQRPGQGLEWMGRIDPASGHTKYDPKFQVRVTITTDTSTSTAYLELSSLRSEDTAVYYCARSGGLPDVWGQGTTVTVSS

SEQ ID NO: 119 - protein, 116 aa, synthetic construct
  REGION 1..116: note = Description of Artificial Sequence: Synthetic polypeptide
QVQLVQSGAEVKKPGASVKVSCKASGFDIQDTYMHWVKQRPGQGLEWMGRIDPASGHTKYDPKFQVRVTITRDTSTSTAYMELSSLRSEDTAVYYCARSGGLPDVWGQGTTVTVSS

SEQ ID NO: 120 - protein, 116 aa, synthetic construct
  REGION 1..116: note = Description of Artificial Sequence: Synthetic polypeptide
QVQLVQSGAEVKKPGASVKVSCKASGFDIQDTYMHWVKQRPGQGLEWIGRIDPASGHTKYDPKFQVRVTITRDTSTSTAYLELSSLRSEDTAVYYCARSGGLPDVWGQGTTVTVSS

SEQ ID NO: 121 - protein, 116 aa, synthetic construct
  REGION 1..116: note = Description of Artificial Sequence: Synthetic polypeptide
QVQLVQSGAEVKKPGASVKVSCKASGFDIQDTYMHWVRQAPGQGLEWMGRIEPASGHIKYDPKFQVRVTMTRDTSTSTVYMELSSLRSEDTAVYYCARSGGLPDWWGQGTTVTVSS

SEQ ID NO: 122 - protein, 116 aa, synthetic construct
  REGION 1..116: note = Description of Artificial Sequence: Synthetic polypeptide
QVQLVQSGAEVKKPGASVKVSCKASGFDIQDTYMHWVRQAPGQGLEWMGRIEPASGHIKYDPKFQVRATMTRDTSTSTVYMELSSLRSEDTAVYYCARSGGLPDWWGQGTTVTVSS

SEQ ID NO: 123 - protein, 116 aa, synthetic construct
  REGION 1..116: note = Description of Artificial Sequence: Synthetic polypeptide
QVQLVQSGAEVKKPGASVKVSCKASGFDIQDTYMHWVRQAPGQGLEWMGRIEPASGHIKYDPKFQVRVTITRDTSTSTVYMELSSLRSEDTAVYYCARSGGLPDWWGQGTTVTVSS

SEQ ID NO: 124 - protein, 116 aa, synthetic construct
  REGION 1..116: note = Description of Artificial Sequence: Synthetic polypeptide
QVQLVQSGAEVKKPGASVKVSCKASGFDIQDTYMHWVRQAPGQGLEWMGRIEPASGHIKYDPKFQVRATITRDTSTSTVYMELSSLRSEDTAVYYCARSGGLPDWWGQGTTVTVSS

SEQ ID NO: 125 - protein, 116 aa, synthetic construct
  REGION 1..116: note = Description of Artificial Sequence: Synthetic polypeptide
QVQLVQSGAEVKKPGASVKVSCKASGFDIQDTYMHWVKQAPGQGLEWMGRIEPASGHIKYDPKFQGRVTMTRDTSTSTVYMELSSLRSEDTAVYYCARSGGLPDWWGQGTTVTVSS

SEQ ID NO: 126 - protein, 116 aa, synthetic construct
  REGION 1..116: note = Description of Artificial Sequence: Synthetic polypeptide
QVQLVQSGAEVKKPGASVKVSCKASGFDIQDTYMHWVKQAPGQGLEWMGRIDPASGHIKYDPKFQGRVTMTRDTSTSTVYMELSSLRSEDTAVYYCARSGGLPDWWGQGTTVTVSS

SEQ ID NO: 127 - protein, 116 aa, synthetic construct
  REGION 1..116: note = Description of Artificial Sequence: Synthetic polypeptide
QVQLVQSGAEVKKPGASVKVSCKASGFDIQDTYMHWVKQAPGQGLEWMGRIEPASGHIKYDPKFQGRATMTRDTSTSTVYMELSSLRSEDTAVYYCARSGGLPDWWGQGTTVTVSS

SEQ ID NO: 128 - protein, 116 aa, synthetic construct
  REGION 1..116: note = Description of Artificial Sequence: Synthetic polypeptide
QVQLVQSGAEVKKPGASVKVSCKASGFDIQDTYMHWVRQAPGQGLEWMGRIEPASGHIKYDPKFQGRATMTRDTSTSTVYMELSSLRSEDTAVYYCARSGGLPDWWGQGTTVTVSS

SEQ ID NO: 129 - protein, 116 aa, synthetic construct
  REGION 1..116: note = Description of Artificial Sequence: Synthetic polypeptide
EVQLVQSGAEVKKPGASVKVSCKASGFDIQDTYMHWVRQAPGQGLEWMGRIEPASGHIKYDPKFQGRATMTRDTSTSTVYMELSSLRSEDTAVYYCARSGGLPDWWGQGTTVTVSS

SEQ ID NO: 130 - protein, 116 aa, synthetic construct
  REGION 1..116: note = Description of Artificial Sequence: Synthetic polypeptide
QVQLVQSGAEVKKPGASVKVSCKASGFDIQDTYMHWVRQAPGQGLEWMGRIDPASGHIKYDPKFQGRATMTRDTSTSTVYMELSSLRSEDTAVYYCARSGGLPDWWGQGTTVTVSS

SEQ ID NO: 131 - protein, 116 aa, synthetic construct
  REGION 1..116: note = Description of Artificial Sequence: Synthetic polypeptide
QVQLVQSGAEVKKPGASVKVSCKASGFDIQDTYMHWVRQAPGQGLEWMGRIEPASGHIKYDPKFQGRATITTDTSTSTVYMELSSLRSEDTAVYYCARSGGLPDWWGQGTTVTVSS

SEQ ID NO: 132 - protein, 116 aa, synthetic construct
  REGION 1..116: note = Description of Artificial Sequence: Synthetic polypeptide
QVQLVQSGAEVKKPGASVKVSCKASGFDIQDTYMHWVRQAPGQGLEWMGRIEPASGHIKYDPKFQGRATMTRDTSTSTAYMELSSLRSEDTAVYYCARSGGLPDWWGQGTTVTVSS

SEQ ID NO: 133 - protein, 116 aa, synthetic construct
  REGION 1..116: note = Description of Artificial Sequence: Synthetic polypeptide
QVQLVQSGAEVKKPGASVKVSCKASGFDIQDTYMHWVRQAPGQGLEWMGRIEPASGHIKYDPKFQGRVTMTRDTSTSTAYMELSSLRSEDTAVYYCARSGGLPDWWGQGTTVTVSS

SEQ ID NO: 134 - protein, 116 aa, synthetic construct
  REGION 1..116: note = Description of Artificial Sequence: Synthetic polypeptide
EVQLVQSGAEVKKPGASVKVSCKASGFDIQDTYMHWVRQAPGQGLEWMGRIEPASGHIKYDPKFQGRVTMTRDTSTSTAYMELSSLRSEDTAVYYCARSGGLPDWWGQGTTVTVSS

SEQ ID NO: 135 - protein, 116 aa, synthetic construct
  REGION 1..116: note = Description of Artificial Sequence: Synthetic polypeptide
QVQLVQSGAEVKKPGASVKVSCKASGFDIQDTYMHWVRQAPGQGLEWMGRIDPASGHIKYDPKFQGRVTMTRDTSTSTAYMELSSLRSEDTAVYYCARSGGLPDWWGQGTTVTVSS

SEQ ID NO: 136 - protein, 116 aa, synthetic construct
  REGION 1..116: note = Description of Artificial Sequence: Synthetic polypeptide
QVQLVQSGAEVKKPGASVKVSCKASGFDIQDTYMHWVRQAPGQGLEWMGRIEPASGHIKYDPKFQGRVTMTRDTSTSTVYMELSSLRSEDTAVYYCARSGGLPDWWGQGTTVTVSS

SEQ ID NO: 137 - protein, 116 aa, synthetic construct
  REGION 1..116: note = Description of Artificial Sequence: Synthetic polypeptide
DVQLVQSGAEVKKPGASVKVSCKASGFDIQDTYMHWVRQAPGQGLEWMGRIEPASGHIKYDPKFQGRVTMTRDTSTSTVYMELSSLRSEDTAVYYCARSGGLPDWWGQGTTVTVSS

SEQ ID NO: 138 - protein, 116 aa, synthetic construct
  REGION 1..116: note = Description of Artificial Sequence: Synthetic polypeptide
QVQLVQSGAEVKKPGASVKVSCKASGFDIQDTYMHWVKQAPGQGLEWIGRIDPASGHTKYDPKFQVRATITTDTSTSTAYLELSSLRSEDTAVYYCARSGGLPDVWGQGTTVTVSS

SEQ ID NO: 139 - protein, 116 aa, synthetic construct
  REGION 1..116: note = Description of Artificial Sequence: Synthetic polypeptide
QVQLVQSGAEVKKPGASVKVSCKASGFDIQDTYMHWVRQAPGQGLEWIGRIDPASGHTKYDPKFQVRATITTDTSTSTAYLELSSLRSEDTAVYYCARSGGLPDVWGQGTTVTVSS

SEQ ID NO: 140 - protein, 116 aa, synthetic construct
  REGION 1..116: note = Description of Artificial Sequence: Synthetic polypeptide
QVQLVQSGAEVKKPGASVKVSCKASGFDIQDTYMHWVKQRPGQGLEWMGRIDPASGHTKYDPKFQVRATITTDTSTSTAYLELSSLRSEDTAVYYCARSGGLPDVWGQGTTVTVSS

SEQ ID NO: 141 - protein, 116 aa, synthetic construct
  REGION 1..116: note = Description of Artificial Sequence: Synthetic polypeptide
QVQLVQSGAEVKKPGASVKVSCKASGFDIQDTYMHWVKQRPGQGLEWIGRIDPASGHTKYDPKFQVRATITTDTSTSTVYLELSSLRSEDTAVYYCARSGGLPDVWGQGTTVTVSS

SEQ ID NO: 142 - protein, 116 aa, synthetic construct
  REGION 1..116: note = Description of Artificial Sequence: Synthetic polypeptide
QVQLVQSGAEVKKPGASVKVSCKASGFDIQDTYMHWVKQRPGQGLEWIGRIDPASGHTKYDPKFQVRATITTDTSTSTAYMELSSLRSEDTAVYYCARSGGLPDVWGQGTTVTVSS

SEQ ID NO: 143 - protein, 116 aa, synthetic construct
  REGION 1..116: note = Description of Artificial Sequence: Synthetic polypeptide
QVQLVQSGAEVKKPGASVKVSCKASGFDIQDTYMHWVKQRPGQGLEWIGRIDPASGHTKYDPKFQVRATITTDTSTSTVYMELSSLRSEDTAVYYCARSGGLPDVWGQGTTVTVSS

SEQ ID NO: 144 - protein, 116 aa, synthetic construct
  REGION 1..116: note = Description of Artificial Sequence: Synthetic polypeptide
QVQLVQSGAEVKKPGASVKVSCKASGFDIQDTYMHWVKQRPGQGLEWIGRIDPASGHTKYDPKFQVRATMTTDTSTSTAYLELSSLRSEDTAVYYCARSGGLPDVWGQGTTVTVSS

SEQ ID NO: 145 - protein, 116 aa, synthetic construct
  REGION 1..116: note = Description of Artificial Sequence: Synthetic polypeptide
QVQLVQSGAEVKKPGASVKVSCKASGFDIQDTYMHWVKQRPGQGLEWIGRIDPASGHTKYDPKFQVRATITRDTSTSTAYLELSSLRSEDTAVYYCARSGGLPDVWGQGTTVTVSS

SEQ ID NO: 146 - protein, 116 aa, synthetic construct
  REGION 1..116: note = Description of Artificial Sequence: Synthetic polypeptide
QVQLVQSGAEVKKPGASVKVSCKASGFDIQDTYMHWVKQRPGQGLEWIGRIDPASGHTKYDPKFQVRVTMTTDTSTSTAYLELSSLRSEDTAVYYCARSGGLPDVWGQGTTVTVSS

SEQ ID NO: 147 - protein, 116 aa, synthetic construct
  REGION 1..116: note = Description of Artificial Sequence: Synthetic polypeptide
QVQLVQSGAEVKKPGASVKVSCKASGFDIQDTYMHWVKQRPGQGLEWIGRIDPASGHTKYDPKFQVRATMTRDTSTSTAYLELSSLRSEDTAVYYCARSGGLPDVWGQGTTVTVSS

SEQ ID NO: 148 - protein, 116 aa, synthetic construct
  REGION 1..116: note = Description of Artificial Sequence: Synthetic polypeptide
QVQLVQSGAEVKKPGASVKVSCKASGFDIQDTYMHWVKQRPGQGLEWIGRIDPASGHTKYDPKFQVRVTMTRDTSTSTAYLELSSLRSEDTAVYYCARSGGLPDVWGQGTTVTVSS

SEQ ID NO: 149 - protein, 116 aa, synthetic construct
  REGION 1..116: note = Description of Artificial Sequence: Synthetic polypeptide
DVQLVQSGAEVKKPGASVKVSCKASGFDIQDTYMHWVKQRPGQGLEWIGRIDPASGHTKYDPKFQVRATITTDTSTSTAYLELSSLRSEDTAVYYCARSGGLPDVWGQGTTVTVSS

SEQ ID NO: 150 - protein, 116 aa, synthetic construct
  REGION 1..116: note = Description of Artificial Sequence: Synthetic polypeptide
QVQLVQSGAEVKKPGASVKVSCKASGFDIQDTYMHWVRQRPGQGLEWMGRIEPASGHIKYDPKFQGRVTMTRDTSTSTVYMELSSLRSEDTAVYYCARSGGLPDWWGQGTTVTVSS

SEQ ID NO: 151 - protein, 116 aa, synthetic construct
  REGION 1..116: note = Description of Artificial Sequence: Synthetic polypeptide
QVQLVQSGAEVKKPGASVKVSCKASGFDIQDTYMHWVRQAPGQGLEWMGRIDPASGHIKYDPKFQGRVTMTRDTSTSTVYMELSSLRSEDTAVYYCARSGGLPDWWGQGTTVTVSS

SEQ ID NO: 152 - protein, 116 aa, synthetic construct
  REGION 1..116: note = Description of Artificial Sequence: Synthetic polypeptide
QVQLVQSGAEVKKPGASVKVSCKASGFDIQDTYMHWVRQAPGQGLEWIGRIEPASGHIKYDPKFQGRVTMTRDTSTSTVYMELSSLRSEDTAVYYCARSGGLPDWWGQGTTVTVSS

SEQ ID NO: 153 - protein, 116 aa, synthetic construct
  REGION 1..116: note = Description of Artificial Sequence: Synthetic polypeptide
QVQLVQSGAEVKKPGASVKVSCKASGFDIQDTYMHWVRQAPGQGLEWIGRIDPASGHIKYDPKFQGRVTMTRDTSTSTVYMELSSLRSEDTAVYYCARSGGLPDWWGQGTTVTVSS

SEQ ID NO: 154 - protein, 116 aa, synthetic construct
  REGION 1..116: note = Description of Artificial Sequence: Synthetic polypeptide
QVQLVQSGAEVKKPGASVKVSCKASGFDIQDTYMHWVRQAPGQGLEWMGRIEPASGHVKYDPKFQGRVTMTRDTSTSTVYMELSSLRSEDTAVYYCARSGGLPDWWGQGTTVTVSS

SEQ ID NO: 155 - protein, 116 aa, synthetic construct
  REGION 1..116: note = Description of Artificial Sequence: Synthetic polypeptide
QVQLVQSGAEVKKPGASVKVSCKASGFDIQDTYMHWVRQAPGQGLEWMGRIEPASGHIKYDPKFQGRVTITRDTSTSTVYMELSSLRSEDTAVYYCARSGGLPDWWGQGTTVTVSS

SEQ ID NO: 156 - protein, 116 aa, synthetic construct
  REGION 1..116: note = Description of Artificial Sequence: Synthetic polypeptide
EVQLVQSGAEVKKPGASVKVSCKASGFDIQDTYMHWVRQAPGQGLEWMGRIEPASGHIKYDPKFQGRVTMTRDTSTSTVYMELSSLRSEDTAVYYCARSGGLPDWWGQGTTVTVSS

SEQ ID NO: 157 - protein, 116 aa, synthetic construct
  REGION 1..116: note = Description of Artificial Sequence: Synthetic polypeptide
QVQLVQSGAEVKKPGASVKVSCKASGFDIQDTYMHWVRQAPGQGLEWMGRIEPASGHIKYDPKFQGRVTMTTDTSTSTVYMELSSLRSEDTAVYYCARSGGLPDWWGQGTTVTVSS

SEQ ID NO: 158 - protein, 116 aa, synthetic construct
  REGION 1..116: note = Description of Artificial Sequence: Synthetic polypeptide
QVQLVQSGAEVKKPGASVKVSCKASGFDIQDTYMHWVRQAPGQGLEWMGRIEPASGHIKYDPKFQGRVTITTDTSTSTVYMELSSLRSEDTAVYYCARSGGLPDWWGQGTTVTVSS

SEQ ID NO: 159 - protein, 116 aa, synthetic construct
  REGION 1..116: note = Description of Artificial Sequence: Synthetic polypeptide
QVQLVQSGAEVKKPGASVKVSCKASGFDIQDTYMHWVRQAPGQGLEWMGRIEPASGHTKYDPKFQGRVTMTRDTSTSTVYMELSSLRSEDTAVYYCARSGGLPDWWGQGTTVTVSS

SEQ ID NO: 160 - protein, 116 aa, synthetic construct
  REGION 1..116: note = Description of Artificial Sequence: Synthetic polypeptide
QVQLVQSGAEVKKPGASVKVSCKASGFDIQDTYMHWVRQAPGQGLEWMGRIEPASGHIKYDPKFQGRATITRDTSTSTVYMELSSLRSEDTAVYYCARSGGLPDWWGQGTTVTVSS

SEQ ID NO: 161 - protein, 116 aa, synthetic construct
  REGION 1..116: note = Description of Artificial Sequence: Synthetic polypeptide
QVQLVQSGAEVKKPGASVKVSCKASGFDIQDTYMHWVRQAPGQGLEWMGRIEPASGHIKYDPKFQGRVTMTRDTSTSTVYLELSSLRSEDTAVYYCARSGGLPDWWGQGTTVTVSS

SEQ ID NO: 162 - protein, 116 aa, synthetic construct
  REGION 1..116: note = Description of Artificial Sequence: Synthetic polypeptide
QVQLVQSGAEVKKPGASVKVSCKASGFDIQDTYMHWVRQAPGQGLEWMGRIEPASGHIKYDPKFQGRVTMTRDTSTSTAYLELSSLRSEDTAVYYCARSGGLPDWWGQGTTVTVSS

SEQ ID NO: 163 - protein, 116 aa, synthetic construct
  REGION 1..116: note = Description of Artificial Sequence: Synthetic polypeptide
QVQLVQSGAEVKKPGASVKVSCKASGFDIQDTYMHWVRQRPGQGLEWMGRIDPASGHTKYDPKFQVRATITTDTSTSTAYLELSSLRSEDTAVYYCARSGGLPDVWGQGTTVTVSS

SEQ ID NO: 164 - protein, 116 aa, synthetic construct
  REGION 1..116: note = Description of Artificial Sequence: Synthetic polypeptide
QVQLVQSGAEVKKPGASVKVSCKASGFDIQDTYMHWVRQRPGQGLEWIGRIDPASGHTKYDPKFQVRVTITTDTSTSTAYLELSSLRSEDTAVYYCARSGGLPDVWGQGTTVTVSS

SEQ ID NO: 165 - protein, 116 aa, synthetic construct
  REGION 1..116: note = Description of Artificial Sequence: Synthetic polypeptide
QVQLVQSGAEVKKPGASVKVSCKASGFDIQDTYMHWVRQRPGQGLEWMGRIDPASGHTKYDPKFQVRVTITTDTSTSTVYLELSSLRSEDTAVYYCARSGGLPDVWGQGTTVTVSS

SEQ ID NO: 166 - protein, 116 aa, synthetic construct
  REGION 1..116: note = Description of Artificial Sequence: Synthetic polypeptide
QVQLVQSGAEVKKPGASVKVSCKASGFDIQDTYMHWVRQRPGQGLEWMGRIDPASGHTKYDPKFQVRVTITTDTSTSTAYMELSSLRSEDTAVYYCARSGGLPDVWGQGTTVTVSS

SEQ ID NO: 167 - protein, 116 aa, synthetic construct
  REGION 1..116: note = Description of Artificial Sequence: Synthetic polypeptide
QVQLVQSGAEVKKPGASVKVSCKASGFDIQDTYMHWVRQRPGQGLEWMGRIDPASGHTKYDPKFQVRVTMTTDTSTSTAYLELSSLRSEDTAVYYCARSGGLPDVWGQGTTVTVSS

SEQ ID NO: 168 - protein, 116 aa, synthetic construct
  REGION 1..116: note = Description of Artificial Sequence: Synthetic polypeptide
QVQLVQSGAEVKKPGASVKVSCKASGFDIQDTYMHWVRQAPGQGLEWMGRIDPASGHIKYDPKFQGRATITTDTSTSTVYMELSSLRSEDTAVYYCARSGGLPDWWGQGTTVTVSS

SEQ ID NO: 169 - protein, 116 aa, synthetic construct
  REGION 1..116: note = Description of Artificial Sequence: Synthetic polypeptide
EVQLVQSGAEVKKPGASVKVSCKASGFDIQDTYMHWVRQAPGQGLEWMGRIEPASGHIKYDPKFQGRATITTDTSTSTVYMELSSLRSEDTAVYYCARSGGLPDWWGQGTTVTVSS

SEQ ID NO: 170-200 - skipped (31 entries)

SEQ ID NO: 201 - protein, 106 aa, synthetic construct
  REGION 1..106: note = Description of Artificial Sequence: Synthetic polypeptide
EIVLTQSPGTLSLSPGERATLSCRASSSVSYMYWYQQKPGQAPRPLIYATSNLASGIPDRFSGSGSGTDFTLTISRLEPEDFAVYYCQQWEGNPRTFGGGTKLEIK

SEQ ID NO: 202 - protein, 106 aa, synthetic construct
  REGION 1..106: note = Description of Artificial Sequence: Synthetic polypeptide
EIVLTQSPGTLSLSPGERATLSCRASSSVSYMYWYQQKPGQAPRLLIYATSNLASGIPDRFSGSGSGTDFTLTISRLEPEDFAVYYCQQWEGNPRTFGGGTKLEIK

SEQ ID NO: 203 - protein, 106 aa, synthetic construct
  REGION 1..106: note = Description of Artificial Sequence: Synthetic polypeptide
EIVLTQSPGTLSLSPGERATLSCRASSSVSYMYWYQQKPGQAPRLLIYATSNLASGIPDRFSGSGSGTDFTLTISRLEPEDFAVYYCQQWSGNPRTFGGGTKLEIK

SEQ ID NO: 204 - protein, 106 aa, synthetic construct
  REGION 1..106: note = Description of Artificial Sequence: Synthetic polypeptide
EIVLTQSPGTLSLSPGERATLSCRASSSVSYMYWYQQKPGQAPRLLIYATSNLASGIPDRFSGSGSGTDFTLTISRLEPEDFAVYYCQQWKGNPRTFGGGTKLEIK

SEQ ID NO: 205 - protein, 106 aa, synthetic construct
  REGION 1..106: note = Description of Artificial Sequence: Synthetic polypeptide
EIVLTQSPGTLSLSPGERATLSCRASSSVSYMYWYQQKPGQAPRPWIYATSNLASGIPDRFSGSGSGTDFTLTISRLEPEDFAVYYCQQWEGNPRTFGGGTKLEIK

SEQ ID NO: 206 - protein, 106 aa, synthetic construct
  REGION 1..106: note = Description of Artificial Sequence: Synthetic polypeptide
EIVLTQSPGTLSLSPGERATLSCRASSSVSYMYWYQQKPGQAPRPLIYATSNLASGIPDRFSGSGSGTDFTLTISRLEPEDFAVYYCQQWKGNPRTFGGGTKLEIK

SEQ ID NO: 207 - protein, 106 aa, synthetic construct
  REGION 1..106: note = Description of Artificial Sequence: Synthetic polypeptide
EIVLTQSPGTLSLSPGERATLSCRASSSVSYMYWYQQKPGQAPRLLIYATSNLASGIPDRFSGSGSGTDFTLTISRLEPEDFAVYYCQQWSRNPRTFGGGTKLEIK

SEQ ID NO: 208 - protein, 106 aa, synthetic construct
  REGION 1..106: note = Description of Artificial Sequence: Synthetic polypeptide
EIVLTQSPGTLSASPGERATMSCRASSSVSYMYWYQQKPGQAPRPWIYATSNLASGVPDRFSGSGSGTDYTLTISRVEPEDFAVYYCQQWSGNPRTFGGGTKLEIK

SEQ ID NO: 209 - protein, 106 aa, synthetic construct
  REGION 1..106: note = Description of Artificial Sequence: Synthetic polypeptide
EIVLTQSPGTLSLSPGERATLSCRASSSVSYMYWYQQKPGQAPRLLIYATSNLASGVPDRFSGSGSGTDFTLTISRLEPEDFAVYYCQQWEGNPRTFGGGTKLEIK

SEQ ID NO: 210 - protein, 106 aa, synthetic construct
  REGION 1..106: note = Description of Artificial Sequence: Synthetic polypeptide
EIVLTQSPGTLSASPGERATLSCRASSSVSYMYWYQQKPGQAPRPWIYATSNLASGVPDRFSGSGSGTDYTLTISRVEPEDFAVYYCQQWSGNPRTFGGGTKLEIK

SEQ ID NO: 211 - protein, 106 aa, synthetic construct
  REGION 1..106: note = Description of Artificial Sequence: Synthetic polypeptide
EIVLTQSPGTLSASPGERATMSCRASSSVSYMYWYQQKPGQAPRLLIYATSNLASGVPDRFSGSGSGTDYTLTISRVEPEDFAVYYCQQWSGNPRTFGGGTKLEIK

SEQ ID NO: 212 - protein, 106 aa, synthetic construct
  REGION 1..106: note = Description of Artificial Sequence: Synthetic polypeptide
EIVLTQSPGTLSASPGERATMSCRASSSVSYMYWYQQKPGQAPRPWIYATSNLASGVPDRFSGSGSGTDFTLTISRVEPEDFAVYYCQQWSGNPRTFGGGTKLEIK

SEQ ID NO: 213 - protein, 106 aa, synthetic construct
  REGION 1..106: note = Description of Artificial Sequence: Synthetic polypeptide
EIVLTQSPGTLSASPGERATMSCRASSSVSYMYWYQQKPGQAPRPWIYATSNLASGVPDRFSGSGSGTDYTLTISRLEPEDFAVYYCQQWSGNPRTFGGGTKLEIK

SEQ ID NO: 214 - protein, 106 aa, synthetic construct
  REGION 1..106: note = Description of Artificial Sequence: Synthetic polypeptide
EIVLTQSPGTLSASPGERATMSCRASSSVSYMYWYQQKPGQAPRPWIYATSNLASGVPDRFSGSGSGTDFTLTISRLEPEDFAVYYCQQWSGNPRTFGGGTKLEIK

SEQ ID NO: 215 - protein, 106 aa, synthetic construct
  REGION 1..106: note = Description of Artificial Sequence: Synthetic polypeptide
EIVLTQSPGTLSASPGERATMSCRASSSVSYMYWYQQKPGQAPRPWIYATSNLASGIPDRFSGSGSGTDYTLTISRVEPEDFAVYYCQQWSGNPRTFGGGTKLEIK

SEQ ID NO: 216 - protein, 106 aa, synthetic construct
  REGION 1..106: note = Description of Artificial Sequence: Synthetic polypeptide
EIVLTQSPGTLSLSPGERATLSCRASSSVSYMYWYQQKPGQAPRLLIYATSNLASGIPDRFSGSGSGTDYTLTISRLEPEDFAVYYCQQWEGNPRTFGGGTKLEIK

SEQ ID NO: 217 - protein, 106 aa, synthetic construct
  REGION 1..106: note = Description of Artificial Sequence: Synthetic polypeptide
EIVLTQSPGTLSLSPGERATLSCRASSSVSYMYWYQQKPGQAPRLLIYATSNLASGIPDRFSGSGSGTDFTLTISRVEPEDFAVYYCQQWEGNPRTFGGGTKLEIK

SEQ ID NO: 218 - protein, 106 aa, synthetic construct
  REGION 1..106: note = Description of Artificial Sequence: Synthetic polypeptide
EIVLTQSPGTLSLSPGERATLSCRASSSVSYMYWYQQKPGQAPRLLIYATSNLASGIPDRFSGSGSGTDYTLTISRVEPEDFAVYYCQQWEGNPRTFGGGTKLEIK

SEQ ID NO: 219 - protein, 106 aa, synthetic construct
  REGION 1..106: note = Description of Artificial Sequence: Synthetic polypeptide
EIVLTQSPGTLSASPGERATLSCRASSSVSYMYWYQQKPGQAPRLLIYATSNLASGIPDRFSGSGSGTDFTLTISRLEPEDFAVYYCQQWEGNPRTFGGGTKLEIK

SEQ ID NO: 220 - protein, 106 aa, synthetic construct
  REGION 1..106: note = Description of Artificial Sequence: Synthetic polypeptide
EIVLTQSPGTMSLSPGERATLSCRASSSVSYMYWYQQKPGQAPRLLIYATSNLASGIPDRFSGSGSGTDFTLTISRLEPEDFAVYYCQQWEGNPRTFGGGTKLEIK

SEQ ID NO: 221-300 - skipped (80 entries)

SEQ ID NO: 301 - protein, 124 aa, synthetic construct
  REGION 1..124: note = Description of Artificial Sequence: Synthetic polypeptide
  VARIANT 1: note = A, R, N, D, C, Q, E, G, H, I, L, K, M, F, P, S, T, W, Y, or V
  REGION 26..35: note = This region may encompass one of the following sequences: GFDIQDTYMH or DTYMH or KYDIN or GFEIQDTYMH or GFDPQDTY MH or GFDVQDTYMH or GFDIGDTYMH or GFDISDTYMH or GFDIVD TYMH or GFDIQDAYMH or GFDIQDSYMH or GFDIQDTFMH or GFD
  REGION 26..35: note = CONT. FROM ABOVE: IQDTYIH or GFDLQDTYMH or GFDIQDTYLH or GFDIGDTFIH or GFDIGDTFMH or GFDIGDTYIH or GFDIQDTFIH or GFDIQDTFMH or GFDIQDTYIH or GFDISDTFIH or GFDISDTFMH or GFDISDTYIH or GFDISDTYMH or GFDIVDTFIH or GFDIVDTFMH or
  REGION 26..35: note = CONT. FROM ABOVE: GFDIVDTYIH or GFDPGDTFIH or GFDPGDTFMH or GFDPGDTYIH or GFDPGDTYMH or GFDPQDTFIH or GFDPQDTFMH or GFDPQDTYIH or GFDPQDTYMH or GFDPSDTFIH or GFDPSDTFMH or GFDPSDTYIH or GFDPSDTYMH or GFDPVDTFIH or GFDPVDTFMH
  REGION 26..35: note = CONT. FROM ABOVE: or GFDPVDTYIH or GFDPVDTYMH or GFDVGDTFI H or GFDVGDTFMH or GFDVGDTYIH or GFDVGDTYMH or GFDVQDTF IH or GFDVQDTFMH or GFDVQDTYIH or GFDVSDTFIH or GFDVSDT FMH or GFDVSDTYIH or GFDVSDTYMH or GFDVVDTFIH or GFDVVD
  REGION 26..35: note = CONT. FROM ABOVE: TFMH or GFDVVDTYIH or GFDVVDTYMH or GFE IGDTFIH or GFEIGDTFMH or GFEIGDTYIH or GFEIGDTYMH or GF EIQDTFIH or GFEIQDTFMH or GFEIQDTYIH or GFEIQDTYMH or G FEISDTFIH or GFEISDTFMH or GFEISDTYIH or GFEISDTYMH or
  REGION 26..35: note = CONT. FROM ABOVE: GFEIVDTFIH or GFEIVDTFMH or GFEIVDTYIH or GFEIVDTYMH or GFEPGDTFIH or GFEPGDTFMH or GFEPGDTYIH or GFEPGDTYMH or GFEPQDTFIH or GFEPQDTFMH or GFEPQDTYIH or GFEPQDTYMH or GFEPSDTFIH or GFEPSDTFMH or GFEPSDTYIH
  REGION 26..35: note = CONT. FROM ABOVE: or GFEPSDTYMH or GFEPVDTFIH or GFEPVDTFMH or GFEPVDTYIH or GFEPVDTYMH or GFEVGDTFIH or GFEVGDTF MH or GFEVGDTYIH or GFEVGDTYMH or GFEVQDTFIH or GFEVQDT FMH or GFEVQDTYIH or GFEVQDTYMH or GFEVSDTFIH or GFEVSD
  REGION 26..35: note = CONT. FROM ABOVE: TFMH or GFEVSDTYIH or GFEVSDTYMH or GFE VVDTFIH or GFEVVDTFMH or GFEVVDTYIH or GFEVVDTYMH or GF TFSSYW or GGSFTGFY or GYDFTYYGIS or SRSYYWG or TSNMGVV or LYGMN or NYGMN or GYTFTSSWMH or GYTFTSYDIN or SYF
  REGION 26..35: note = CONT. FROM ABOVE: WS or GYYWN or GFTFSTYG or TYGMS
  VARIANT 38: note = A, R, N, D, C, Q, E, G, H, I, L, K, M, F, P, S, T, W, Y, or V
  VARIANT 40: note = A, R, N, D, C, Q, E, G, H, I, L, K, M, F, P, S, T, W, Y, or V
  VARIANT 48: note = A, R, N, D, C, Q, E, G, H, I, L, K, M, F, P, S, T, W, Y, or V
  REGION 50..66: note = This region may encompass one of the following sequences: RIDPASGHTKYDPKFQV or RIEPASGHIKYDPKFQG or RIDPASGHIKYDPKF QG or RIEPASGHIKYDPKFQV or WIFPGDGRTDYNEKFKG or RLDPASGHT K or RIEPASGHTK or RIDPESGHTK or RIDPASGHTK or RIDPAGGH
  REGION 50..66: note = CONT. FROM ABOVE: TK or RIDPASAHTK or RIDPASGHIK or RIDPA SGHLK or RIDPASGHVK or YDPKFQV or IDPKFQV or LDPKFQV or MDPKFQV or SDPKFQV or TDPKFQV or VDPKFQV or YIPKFQV or YNPKFQV or YRPKFQV or YSPKFQV or YDPKFRV or YDPKFQA
  REGION 50..66: note = CONT. FROM ABOVE: or YDPKFQD or YDPKFQE or YDPKFQG or YD PKFQH or YDPKFQK or YDPKFQL or YDPKFQM or YDPKFQN or Y DPKFQP or YDPKFQR or YDPKFQS or YDPKFQT or RIEPASGHIKYD PKFQG or RIEPASGHIKYSPKFQG or RIEPASGHVKYSPKFQV or RIEPAS
  REGION 50..66: note = CONT. FROM ABOVE: GHVKYDPKFQT or RIDPASGHIKYDPKFQK or RIDPA SGHVKIDPKFQV or RIDPASGHLKYDPKFQV or RIDPASGHLKYDPKFQR or RIDPASGHLKYDPKFQN or RIEPASGHLKYDPKFQE or PASGH or RIDPA SGHTKYDPKFQV or RIDPASGHLKYDPKFQG or RIDPASGHTKYDPKFQG or
  REGION 50..66: note = CONT. FROM ABOVE: RIDPASGHSKYDPKFQV or RIDPASGHYKYDPKFQV or IKEDGSEK or INHRGNT or WISTYNGNTHYARMLQG or SIYYNGRTYYNP SLKS or HILWDDREYSNPALKS or WINTYTGEPTYADDFKG or IHPNSGGT or YIYYSGNTKYNPSLKS or EINHAGNTNYNPSLKS or ISGTGRTT or
  REGION 50..66: note = CONT. FROM ABOVE: WMNTYSGVTTYADDFKG
  VARIANT 68: note = A, R, N, D, C, Q, E, G, H, I, L, K, M, F, P, S, T, W, Y, or V
  VARIANT 70: note = A, R, N, D, C, Q, E, G, H, I, L, K, M, F, P, S, T, W, Y, or V
  VARIANT 72: note = A, R, N, D, C, Q, E, G, H, I, L, K, M, F, P, S, T, W, Y, or V
  VARIANT 79: note = A, R, N, D, C, Q, E, G, H, I, L, K, M, F, P, S, T, W, Y, or V
  VARIANT 81: note = A, R, N, D, C, Q, E, G, H, I, L, K, M, F, P, S, T, W, Y, or V
  REGION 99..113: note = This region may encompass one of the following sequences: SGGLPDV or ARSGGLPDV or SGGLPDW or ARSGGLPDW or YGPAMD Y or LGGLPDV or SAGLPDV or SGGAPDV or SGGMPDV or SGGL PEV or SGGLPDK or SGGLPDM or SGGLPDQ or SGGLPDR or SG
  REGION 99..113: note = CONT. FROM ABOVE: GLPDS or SGGLPDT or SGGLPDH or SGGLPDF or SGGSPDV or ARSGGLPDM or ARSGGLPDK or SGGLPD or ARS GGLPDF or ARSGGLPDL or SGGLPDE or SGGLPDI or SGGLPDK or SGGLPDL or SGGLPDM or SGGLPDQ or SGGLPDT or SGGLPDW
  REGION 99..113: note = CONT. FROM ABOVE: or SGGLPDY or SGGMPDE or SGGMPDI or S GGMPDK or SGGMPDL or SGGMPDM or SGGMPDQ or SGGMPDT or SGGMPDV or SGGMPDW or SGGMPDY or AREDYDSYYKYGMDV or AS PFYDFWSGSDY or ENYYGSGAYRGGMDV or EDYGDYGAFDI or MSRNYYGS
  REGION 99..113: note = CONT. FROM ABOVE: SYVMDY or DTAMDYAMAY or DYGKYGDYYAMDY or ARGDYYGYVSWFAY or EVPETAAFEY or ETGSYYGFDY or GYCRSTTCYF DY or TKERGDYYYGVFDY or EGYVFDDYYATDY
  REGION 1..124: note = See specification as filed for detailed description of substitutions and preferred embodiments
XVQLVQSGAEVKKPGASVKVSCKASXXXXXXXXXXWVXQXPGQGLEWXGXXXXXXXXXXXXXXXXXRXTXTXDTSTSTXYXELSSLRSEDTAVYYCARXXXXXXXXXXXXXXXWGQGTTVTVSS

SEQ ID NO: 302 - protein, 122 aa, synthetic construct
  REGION 1..122: note = Description of Artificial Sequence: Synthetic polypeptide
  VARIANT 1: note = A, R, N, D, C, Q, E, G, H, I, L, K, M, F, P, S, T, W, Y, or V
  REGION 26..35: note = This region may encompass one of the following sequences: GFDIQDTYMH or DTYMH or KYDIN or GFEIQDTYMH or GFDPQDTY MH or GFDVQDTYMH or GFDIGDTYMH or GFDISDTYMH or GFDIVD TYMH or GFDIQDAYMH or GFDIQDSYMH or GFDIQDTFMH or GFD
  REGION 26..35: note = CONT. FROM ABOVE: IQDTYIH or GFDLQDTYMH or GFDIQDTYLH or GFDIGDTFIH or GFDIGDTFMH or GFDIGDTYIH or GFDIQDTFIH or GFDIQDTFMH or GFDIQDTYIH or GFDISDTFIH or GFDISDTFMH or GFDISDTYIH or GFDISDTYMH or GFDIVDTFIH or GFDIVDTFMH or
  REGION 26..35: note = CONT. FROM ABOVE: GFDIVDTYIH or GFDPGDTFIH or GFDPGDTFMH or GFDPGDTYIH or GFDPGDTYMH or GFDPQDTFIH or GFDPQDTFMH or GFDPQDTYIH or GFDPQDTYMH or GFDPSDTFIH or GFDPSDTFMH or GFDPSDTYIH or GFDPSDTYMH or GFDPVDTFIH or GFDPVDTFMH
  REGION 26..35: note = CONT. FROM ABOVE: or GFDPVDTYIH or GFDPVDTYMH or GFDVGDTFI H or GFDVGDTFMH or GFDVGDTYIH or GFDVGDTYMH or GFDVQDTF IH or GFDVQDTFMH or GFDVQDTYIH or GFDVSDTFIH or GFDVSDT FMH or GFDVSDTYIH or GFDVSDTYMH or GFDVVDTFIH or GFDVVD
  REGION 26..35: note = CONT. FROM ABOVE: TFMH or GFDVVDTYIH or GFDVVDTYMH or GFE IGDTFIH or GFEIGDTFMH or GFEIGDTYIH or GFEIGDTYMH or GF EIQDTFIH or GFEIQDTFMH or GFEIQDTYIH or GFEIQDTYMH or G FEISDTFIH or GFEISDTFMH or GFEISDTYIH or GFEISDTYMH or
  REGION 26..35: note = CONT. FROM ABOVE: GFEIVDTFIH or GFEIVDTFMH or GFEIVDTYIH or GFEIVDTYMH or GFEPGDTFIH or GFEPGDTFMH or GFEPGDTYIH or GFEPGDTYMH or GFEPQDTFIH or GFEPQDTFMH or GFEPQDTYIH or GFEPQDTYMH or GFEPSDTFIH or GFEPSDTFMH or GFEPSDTYIH
  REGION 26..35: note = CONT. FROM ABOVE: or GFEPSDTYMH or GFEPVDTFIH or GFEPVDTFM H or GFEPVDTYIH or GFEPVDTYMH or GFEVGDTFIH or GFEVGDTF MH or GFEVGDTYIH or GFEVGDTYMH or GFEVQDTFIH or GFEVQDT FMH or GFEVQDTYIH or GFEVQDTYMH or GFEVSDTFIH or GFEVSD
  REGION 26..35: note = CONT. FROM ABOVE: TFMH or GFEVSDTYIH or GFEVSDTYMH or GFE VVDTFIH or GFEVVDTFMH or GFEVVDTYIH or GFEVVDTYMH or GF TFSSYW or GGSFTGFY or GYDFTYYGIS or SRSYYWG or TSNMGVV or LYGMN or NYGMN or GYTFTSSWMH or GYTFTSYDIN or SYF
  REGION 26..35: note = CONT. FROM ABOVE: WS or GYYWN or GFTFSTYG or TYGMS
  VARIANT 38: note = A, R, N, D, C, Q, E, G, H, I, L, K, M, F, P, S, T, W, Y, or V
  VARIANT 40: note = A, R, N, D, C, Q, E, G, H, I, L, K, M, F, P, S, T, W, Y, or V
  VARIANT 48: note = A, R, N, D, C, Q, E, G, H, I, L, K, M, F, P, S, T, W, Y, or V
  REGION 50..66: note = This region may encompass one of the following sequences: RIDPASGHTKYDPKFQV or RIEPASGHIKYDPKFQG or RIDPASGHIKYDPKF QG or RIEPASGHIKYDPKFQV or WIFPGDGRTDYNEKFKG or RLDPASGHT K or RIEPASGHTK or RIDPESGHTK or RIDPASGHTK or RIDPAGGH
  REGION 50..66: note = CONT. FROM ABOVE: TK or RIDPASAHTK or RIDPASGHIK or RIDPA SGHLK or RIDPASGHVK or YDPKFQV or IDPKFQV or LDPKFQV or MDPKFQV or SDPKFQV or TDPKFQV or VDPKFQV or YIPKFQV or YNPKFQV or YRPKFQV or YSPKFQV or YDPKFRV or YDPKFQA
  REGION 50..66: note = CONT. FROM ABOVE: or YDPKFQD or YDPKFQE or YDPKFQG or YD PKFQH or YDPKFQK or YDPKFQL or YDPKFQM or YDPKFQN or Y DPKFQP or YDPKFQR or YDPKFQS or YDPKFQT or RIEPASGHIKYD PKFQG or RIEPASGHIKYSPKFQG or RIEPASGHVKYSPKFQV or RIEPAS
  REGION 50..66: note = CONT. FROM ABOVE: GHVKYDPKFQT or RIDPASGHIKYDPKFQK or RIDPA SGHVKIDPKFQV or RIDPASGHLKYDPKFQV or RIDPASGHLKYDPKFQR or RIDPASGHLKYDPKFQN or RIEPASGHLKYDPKFQE or PASGH or RIDPA SGHTKYDPKFQV or RIDPASGHLKYDPKFQG or RIDPASGHTKYDPKFQG or
  REGION 50..66: note = CONT. FROM ABOVE: RIDPASGHSKYDPKFQV or RIDPASGHYKYDPKFQV or IKEDGSEK or INHRGNT or WISTYNGNTHYARMLQG or SIYYNGRTYYNP SLKS or HILWDDREYSNPALKS or WINTYTGEPTYADDFKG or IHPNSGGT or YIYYSGNTKYNPSLKS or EINHAGNTNYNPSLKS or ISGTGRTT or
  REGION 50..66: note = CONT. FROM ABOVE: WMNTYSGVTTYADDFKG
  VARIANT 68: note = A, R, N, D, C, Q, E, G, H, I, L, K, M, F, P, S, T, W, Y, or V
  VARIANT 70: note = A, R, N, D, C, Q, E, G, H, I, L, K, M, F, P, S, T, W, Y, or V
  VARIANT 72: note = A, R, N, D, C, Q, E, G, H, I, L, K, M, F, P, S, T, W, Y, or V
  VARIANT 79: note = A, R, N, D, C, Q, E, G, H, I, L, K, M, F, P, S, T, W, Y, or V
  VARIANT 81: note = A, R, N, D, C, Q, E, G, H, I, L, K, M, F, P, S, T, W, Y, or V
  REGION 97..111: note = This region may encompass one of the following sequences: SGGLPDV or ARSGGLPDV or SGGLPDW or ARSGGLPDW or YGPAMD Y or LGGLPDV or SAGLPDV or SGGAPDV or SGGMPDV or SGGL PEV or SGGLPDK or SGGLPDM or SGGLPDQ or SGGLPDR or SG
  REGION 97..111: note = CONT. FROM ABOVE: GLPDS or SGGLPDT or SGGLPDH or SGGLPDF or SGGSPDV or ARSGGLPDM or ARSGGLPDK or SGGLPD or ARS GGLPDF or ARSGGLPDL or SGGLPDE or SGGLPDI or SGGLPDK or SGGLPDL or SGGLPDM or SGGLPDQ or SGGLPDT or SGGLPDW
  REGION 97..111: note = CONT. FROM ABOVE: or SGGLPDY or SGGMPDE or SGGMPDI or S GGMPDK or SGGMPDL or SGGMPDM or SGGMPDQ or SGGMPDT or SGGMPDV or SGGMPDW or SGGMPDY or AREDYDSYYKYGMDV or AS PFYDFWSGSDY or ENYYGSGAYRGGMDV or EDYGDYGAFDI or MSRNYYGS
  REGION 97..111: note = CONT. FROM ABOVE: SYVMDY or DTAMDYAMAY or DYGKYGDYYAMDY or ARGDYYGYVSWFAY or EVPETAAFEY or ETGSYYGFDY or GYCRSTTCYF DY or TKERGDYYYGVFDY or EGYVFDDYYATDY
  REGION 1..122: note = See specification as filed for detailed description of substitutions and preferred embodiments
XVQLVQSGAEVKKPGASVKVSCKASXXXXXXXXXXWVXQXPGQGLEWXGXXXXXXXXXXXXXXXXXRXTXTXDTSTSTXYXELSSLRSEDTAVYYCXXXXXXXXXXXXXXXWGQGTTVTVSS

SEQ ID NO: 303 - protein, 112 aa, synthetic construct
  REGION 1..112: note = Description of Artificial Sequence: Synthetic polypeptide
  REGION 24..39: note = This region may encompass one of the following sequences: RASSSVSYMY or RSSQTIVHSNGDTYLD or GASSSVSYMY or WASSSVSY MY or RASSSVIYMY or RASSSVSFMY or RASSSVSYLY or RASSSVS YMR or GASSSVSYMY or ASSSVSYMY or QSILYSSNNKNY or QSLVH
  REGION 24..39: note = CONT. FROM ABOVE: SDGNTY or RASQSVSSYLA or RASQGISSALA or SASSSVNYMH or KSSQNIVHSDGNTYLE or RSSQSIVHSNGNTYLD or QN INVL or RASQSINNYLN or RASQSVRSSYLA or QTISSW or RSSQNI VHSDGNTYLE
  VARIANT 51..52: note = A, R, N, D, C, Q, E, G, H, I, L, K, M, F, P, S, T, W, Y, or V
  REGION 55..61: note = This region may encompass one of the following sequences: ATSNLAS or KVSNRFS or AKSNLAS or ATPNLAS or ATENLAS or ATSLLAS or ATSPLAS or ATSNLTS or WAS or KIS or DAS NRAT or DASSLES or STSNLAS or KVSNRFS or KAS or GYYNR
  REGION 55..61: note = CONT. FROM ABOVE: PS or AASSLQS or GASSRAT or AAS or KV SNRFS
  REGION 94..102: note = This region may encompass one of the following sequences: QQWEGNPRT or QQWKGNPRT or QQWSGNPRT or QQWSRNPRT or FQ GSHVPYT or HQWSGNPRT or NQWSGNPRT or SQWSGNPRT or QQSSG NPRT or QQWDGNPRT or QQWHGNPRT or QQWNGNPRT or QQWQGNPR
  REGION 94..102: note = CONT. FROM ABOVE: T or QQWVGNPRT or QQWSANPRT or QQWSDNPR T or QQWSQNPRT or QQWSSNPRT or QQWSGNPRS or QQFSGNPRT or QQHSGNPRT or QQISGNPRT or QQPSGNPRT or QQRSGNPRT or QQYSGNPRT or QQWSGHPRT or QQWSGLPRT or QQWSGQPRT or QQ
  REGION 94..102: note = CONT. FROM ABOVE: WSGSPRT or QQWSGTPRT or QQWSGMPRT or QQ WSGFPRT or QQWSGKPRT or QQWSGRPRT or QQWSGDPRT or QQWAG NPRT or QQWYGNPRT or QQWFGNPRT or QQWQGNPRT or GNPRT or SQWSGNPRT or QQWSGNPRS or QQWSGTPRT or QQWSGDPRT or
  REGION 94..102: note = CONT. FROM ABOVE: QQWSGFPRT or QQWSGKPRT or QQWSGRPRT or QQWSGSPRT or QQWDADPRT or QQWDAFPRT or QQWDAKPRT or QQW DANPRT or QQWDARPRT or QQWDASPRT or QQWDATPRT or QQWDGD PRT or QQWDGFPRT or QQWDGKPRT or QQWDGNPRT or QQWDGRPRT
  REGION 94..102: note = CONT. FROM ABOVE: or QQWDGSPRT or QQWDGTPRT or QQWEADPRT or QQWEAFPRT or QQWEAKPRT or QQWEANPRT or QQWEARPRT or QQWEASPRT or QQWEATPRT or QQWEGDPRT or QQWEGFPRT or QQ WEGKPRT or QQWEGRPRT or QQWEGSPRT or QQWEGTPRT or QQWHA
  REGION 94..102: note = CONT. FROM ABOVE: DPRT or QQWHAFPRT or QQWHAKPRT or QQWHA NPRT or QQWHARPRT or QQWHASPRT or QQWHATPRT or QQWHGDPR T or QQWHGFPRT or QQWHGKPRT or QQWHGNPRT or QQWHGRPRT or QQWHGSPRT or QQWHGTPRT or QQWNADPRT or QQWNAFPRT or
  REGION 94..102: note = CONT. FROM ABOVE: QQWNAKPRT or QQWNANPRT or QQWNARPRT or QQWNASPRT or QQWNATPRT or QQWNGDPRT or QQWNGFPRT or QQ WNGKPRT or QQWNGNPRT or QQWNGRPRT or QQWNGSPRT or QQWNG TPRT or QQWQADPRT or QQWQAFPRT or QQWQAKPRT or QQWQANPR
  REGION 94..102: note = CONT. FROM ABOVE: T or QQWQARPRT or QQWQASPRT or QQWQATPR T or QQWQGDPRT or QQWQGFPRT or QQWQGKPRT or QQWQGRPRT or QQWQGSPRT or QQWQGTPRT or QQWSADPRT or QQWSAFPRT or QQWSAKPRT or QQWSANPRT or QQWSARPRT or QQWSASPRT or QQ
  REGION 94..102: note = CONT. FROM ABOVE: WSATPRT or NQWDAFPRT or NQWDAKPRT or NQ WDANPRT or NQWDARPRT or NQWDASPRT or NQWDATPRT or NQWDG DPRT or NQWDGFPRT or NQWDGKPRT or NQWDGNPRT or NQWDGRPR T or NQWDGSPRT or NQWDGTPRT or NQWEADPRT or NQWEAFPRT
  REGION 94..102: note = CONT. FROM ABOVE: or NQWEAKPRT or NQWEANPRT or NQWEARPRT or NQWEASPRT or NQWEATPRT or NQWEGDPRT or NQWEGFPRT or NQWEGKPRT or NQWEGNPRT or NQWEGRPRT or NQWEGSPRT or NQ WEGTPRT or NQWHADPRT or NQWHAFPRT or NQWHAKPRT or NQWHA
  REGION 94..102: note = CONT. FROM ABOVE: NPRT or NQWHARPRT or NQWHASPRT or NQWHA TPRT or NQWHGDPRT or NQWHGFPRT or NQWHGKPRT or NQWHGNPR T or NQWHGRPRT or NQWHGSPRT or NQWHGTPRT or NQWNADPRT or NQWNAFPRT or NQWNAKPRT or NQWNANPRT or NQWNARPRT or
  REGION 94..102: note = CONT. FROM ABOVE: NQWNASPRT or NQWNATPRT or NQWNGDPRT or NQWNGFPRT or NQWNGKPRT or NQWNGNPRT or NQWNGRPRT or NQ WNGSPRT or NQWNGTPRT or NQWQADPRT or NQWQAFPRT or NQWQA KPRT or NQWQANPRT or NQWQARPRT or NQWQASPRT or NQWQATPR
  REGION 94..102: note = CONT. FROM ABOVE: T or NQWQGDPRT or NQWQGFPRT or NQWQGKPR T or NQWQGNPRT or NQWQGRPRT or NQWQGSPRT or NQWQGTPRT or NQWSADPRT or NQWSAFPRT or NQWSAKPRT or NQWSANPRT or NQWSARPRT or NQWSASPRT or NQWSATPRT or NQWSGDPRT or NQ
  REGION 94..102: note = CONT. FROM ABOVE: WSGFPRT or NQWSGKPRT or NQWSGNPRT or NQ WSGRPRT or NQWSGSPRT or NQWSGTPRT or QQYYSTPFT or MQATQ FPLT or QQRSNWPWT or QQFNSYPLT or HQWNNYGT or FQGSHVPLT or QQGQSYPYT or QQSYSTPRT or QQYGSSPT or QQYHRSWT or
  REGION 94..102: note = CONT. FROM ABOVE: FQGSHVPLT
  REGION 1..112: note = See specification as filed for detailed description of substitutions and preferred embodiments
EIVLTQSPGTLSLSPGERATLSCXXXXXXXXXXXXXXXXWYQQKPGQAPRXXIYXXXXXXXGIPDRFSGSGSGTDFTLTISRLEPEDFAVYYCXXXXXXXXXFGGGTKLEIK

SEQ ID NO: 304 - protein, 25 aa, synthetic construct [sequence omitted]

SEQ ID NO: 305 - protein, 14 aa, synthetic construct
  REGION 1..14: note = Description of Artificial Sequence: Synthetic peptide
WVKQRPGQGLEWMG

SEQ ID NO: 306 - protein, 32 aa, synthetic construct
  REGION 1..32: note = Description of Artificial Sequence: Synthetic polypeptide
RVTITRDTSTSTVYLELSSLRSEDTAVYYCAR

SEQ ID NO: 307 - protein, 30 aa, synthetic construct
  REGION 1..30: note = Description of Artificial Sequence: Synthetic polypeptide
RVTITRDTSTSTVYLELSSLRSEDTAVYYC

SEQ ID NO: 308 - protein, 11 aa, synthetic construct
  REGION 1..11: note = Description of Artificial Sequence: Synthetic peptide
WGQGTTVTVSS

SEQ ID NO: 309 - protein, 23 aa, synthetic construct
  REGION 1..23: note = Description of Artificial Sequence: Synthetic peptide
EIVLTQSPGTLSLSPGERATLSC

SEQ ID NO: 310 - protein, 15 aa, synthetic construct
  REGION 1..15: note = Description of Artificial Sequence: Synthetic peptide
WYQQKPGQAPRPLIY

SEQ ID NO: 311 - protein, 32 aa, synthetic construct
  REGION 1..32: note = Description of Artificial Sequence: Synthetic polypeptide
GIPDRFSGSGSGTDFTLTISRLEPEDFAVYYC

SEQ ID NO: 312 - protein, 10 aa, synthetic construct
  REGION 1..10: note = Description of Artificial Sequence: Synthetic peptide
FGGGTKLEIK

SEQ ID NO: 313 - protein, 14 aa, synthetic construct
  REGION 1..14: note = Description of Artificial Sequence: Synthetic peptide
WVRQRPGQGLEWIG

SEQ ID NO: 314 - protein, 32 aa, synthetic construct
  REGION 1..32: note = Description of Artificial Sequence: Synthetic polypeptide
RATITTDTSTSTAYLELSSLRSEDTAVYYCAR

SEQ ID NO: 315 - protein, 30 aa, synthetic construct
  REGION 1..30: note = Description of Artificial Sequence: Synthetic polypeptide
RATITTDTSTSTAYLELSSLRSEDTAVYYC

SEQ ID NO: 316 - protein, 98 aa, synthetic construct
  REGION 1..98: note = Description of Artificial Sequence: Synthetic polypeptide
QVQLVQSGAEVKKPGASVKVSCKASGYTFNSYYMHWVRQAPGQGLEWMGIINPSGGSTSYAQKFQGRVTMTRDTSTSTVYMELSSLRSEDTAVYYCAR

SEQ ID NO: 317 - protein, 96 aa, synthetic construct
  REGION 1..96: note = Description of Artificial Sequence: Synthetic polypeptide
EIVLTQSPGTLSLSPGERATLSCRASQSVSSSYLAWYQQKPGQAPRLLIYGASSRATGIPDRFSGSGSGTDFTLTISRLEPEDFAVYYCQQYGSSP

SEQ ID NO: 318 - skipped

SEQ ID NO: 319 - protein, 107 aa, synthetic construct [sequence omitted]

SEQ ID NO: 320 - protein, 330 aa, synthetic construct [sequence omitted]

SEQ ID NO: 321 - protein, 330 aa, synthetic construct
  REGION 1..330: note = Description of Artificial Sequence: Synthetic polypeptide
ASTKGPSVFPLAPSSKSTSGGTAALGCLVKDYFPEPVTVSWNSGALTSGVHTFPAVLQSSGLYSLSSVVTVPSSSLGTQTYICNVNHKPSNTKVDKRVEPKSCDKTHTCPPCPAPELLGGPSVFLFPPKPKDTLMISRTPEVTCVVVDVSHEDPEVKFNWYVDGVEVHNAKTKPREEQYNSTYRVVSVLTVLHQDWLNGKEYKCKVSNKALPAPIEKTISKAKGQPREPQVYTLPPSREEMTKNQVSLTCLVKGFYPSDIAVEWESNGQPENNYKTTPPVLDSDGSFFLYSKLTVDKSRWQQGNVFSCSVMHEALHNHYTQKSLSLSPGK

SEQ ID NO: 322 - protein, 330 aa, synthetic construct
  REGION 1..330: note = Description of Artificial Sequence: Synthetic polypeptide
ASTKGPSVFPLAPSSKSTSGGTAALGCLVKDYFPEPVTVSWNSGALTSGVHTFPAVLQSSGLYSLSSVVTVPSSSLGTQTYICNVNHKPSNTKVDKKVEPKSCDKTHTCPPCPAPELLGGPSVFLFPPKPKDTLMISRTPEVTCVVVDVSHEDPEVKFNWYVDGVEVHNAKTKPREEQYNSTYRVVSVLTVLHQDWLNGKEYKCKVSNKALPAPIEKTISKAKGQPREPQVYTLPPSREEMTKNQVSLTCLVKGFYPSDIAVEWESNGQPENNYKTTPPVLDSDGSFFLYSKLTVDKSRWQQGNVFSCSVMHEALHNHYTQKSLSLSPGK

SEQ ID NO: 323 - protein, 330 aa, synthetic construct
  REGION 1..330: note = Description of Artificial Sequence: Synthetic polypeptide
ASTKGPSVFPLAPSSKSTSGGTAALGCLVKDYFPEPVTVSWNSGALTSGVHTFPAVLQSSGLYSLSSVVTVPSSSLGTQTYICNVNHKPSNTKVDKKVEPKSCDKTHTCPPCPAPELEGGPSVFLFPPKPKDTLMISRTPEVTCVVVDVSHEDPEVKFNWYVDGVEVHNAKTKPREEQYNSTYRVVSVLTVLHQDWLNGKEYKCKVSNKALPAPIEKTISKAKGQPREPQVYTLPPSRDELTKNQVSLTCLVKGFYPSDIAVEWESNGQPENNYKTTPPVLDSDGSFFLYSKLTVDKSRWQQGNVFSCSVMHEALHNHYTQKSLSLSPGK

SEQ ID NO: 324 - protein, 330 aa, synthetic construct
  REGION 1..330: note = Description of Artificial Sequence: Synthetic polypeptide
ASTKGPSVFPLAPSSKSTSGGTAALGCLVKDYFPEPVTVSWNSGALTSGVHTFPAVLQSSGLYSLSSVVTVPSSSLGTQTYICNVNHKPSNTKVDKRVEPKSCDKTHTCPPCPAPELEGGPSVFLFPPKPKDTLMISRTPEVTCVVVDVSHEDPEVKFNWYVDGVEVHNAKTKPREEQYNSTYRVVSVLTVLHQDWLNGKEYKCKVSNKALPAPIEKTISKAKGQPREPQVYTLPPSREEMTKNQVSLTCLVKGFYPSDIAVEWESNGQPENNYKTTPPVLDSDGSFFLYSKLTVDKSRWQQGNVFSCSVMHEALHNHYTQKSLSLSPGK

SEQ ID NO: 325 - protein, 330 aa, synthetic construct
  REGION 1..330: note = Description of Artificial Sequence: Synthetic polypeptide
ASTKGPSVFPLAPSSKSTSGGTAALGCLVKDYFPEPVTVSWNSGALTSGVHTFPAVLQSSGLYSLSSVVTVPSSSLGTQTYICNVNHKPSNTKVDKKVEPKSCDKTHTCPPCPAPELEGGPSVFLFPPKPKDTLMISRTPEVTCVVVDVSHEDPEVKFNWYVDGVEVHNAKTKPREEQYNSTYRVVSVLTVLHQDWLNGKEYKCKVSNKALPAPIEKTISKAKGQPREPQVYTLPPSREEMTKNQVSLTCLVKGFYPSDIAVEWESNGQPENNYKTTPPVLDSDGSFFLYSKLTVDKSRWQQGNVFSCSVMHEALHNHYTQKSLSLSPGK

SEQ ID NO: 326 - protein, 330 aa, synthetic construct
  REGION 1..330: note = Description of Artificial Sequence: Synthetic polypeptide
ASTKGPSVFPLAPSSKSTSGGTAALGCLVKDYFPEPVTVSWNSGALTSGVHTFPAVLQSSGLYSLSSVVTVPSSSLGTQTYICNVNHKPSNTKVDKKVEPKSCDKTHTCPPCPAPEAAGGPSVFLFPPKPKDTLMISRTPEVTCVVVDVSHEDPEVKFNWYVDGVEVHNAKTKPREEQYNSTYRVVSVLTVLHQDWLNGKEYKCKVSNKALPAPIEKTISKAKGQPREPQVYTLPPSRDELTKNQVSLTCLVKGFYPSDIAVEWESNGQPENNYKTTPPVLDSDGSFFLYSKLTVDKSRWQQGNVFSCSVMHEALHNHYTQKSLSLSPGK

SEQ ID NO: 327 - protein, 330 aa, synthetic construct
  REGION 1..330: note = Description of Artificial Sequence: Synthetic polypeptide
ASTKGPSVFPLAPSSKSTSGGTAALGCLVKDYFPEPVTVSWNSGALTSGVHTFPAVLQSSGLYSLSSVVTVPSSSLGTQTYICNVNHKPSNTKVDKRVEPKSCDKTHTCPPCPAPEAAGGPSVFLFPPKPKDTLMISRTPEVTCVVVDVSHEDPEVKFNWYVDGVEVHNAKTKPREEQYNSTYRVVSVLTVLHQDWLNGKEYKCKVSNKALPAPIEKTISKAKGQPREPQVYTLPPSREEMTKNQVSLTCLVKGFYPSDIAVEWESNGQPENNYKTTPPVLDSDGSFFLYSKLTVDKSRWQQGNVFSCSVMHEALHNHYTQKSLSLSPGK

SEQ ID NO: 328 - protein, 330 aa, synthetic construct
  REGION 1..330: note = Description of Artificial Sequence: Synthetic polypeptide
ASTKGPSVFPLAPSSKSTSGGTAALGCLVKDYFPEPVTVSWNSGALTSGVHTFPAVLQSSGLYSLSSVVTVPSSSLGTQTYICNVNHKPSNTKVDKKVEPKSCDKTHTCPPCPAPEAAGGPSVFLFPPKPKDTLMISRTPEVTCVVVDVSHEDPEVKFNWYVDGVEVHNAKTKPREEQYNSTYRVVSVLTVLHQDWLNGKEYKCKVSNKALPAPIEKTISKAKGQPREPQVYTLPPSREEMTKNQVSLTCLVKGFYPSDIAVEWESNGQPENNYKTTPPVLDSDGSFFLYSKLTVDKSRWQQGNVFSCSVMHEALHNHYTQKSLSLSPGK

SEQ ID NO: 329 - protein, 329 aa, synthetic construct
  REGION 1..329: note = Description of Artificial Sequence: Synthetic polypeptide
ASTKGPSVFPLAPSSKSTSGGTAALGCLVKDYFPEPVTVSWNSGALTSGVHTFPAVLQSSGLYSLSSVVTVPSSSLGTQTYICNVNHKPSNTKVDKKVEPKSCDKTHTCPPCPAPEAAGAPSVFLFPPKPKDTLMISRTPEVTCVVVDVSHEDPEVKFNWYVDGVEVHNAKTKPREEQYNSTYRVVSVLTVLHQDWLNGKEYKCKVSNKALPAPIEKTISKAKGQPREPQVYTLPPSRDELTKNQVSLTCLVKGFYPSDIAVEWESNGQPENNYKTTPPVLDSDGSFFLYSKLTVDKSRWQQGNVFSCSVMHEALHNHYTQKSLSLSPG

SEQ ID NO: 330 - protein, 329 aa, synthetic construct
  REGION 1..329: note = Description of Artificial Sequence: Synthetic polypeptide
ASTKGPSVFPLAPSSKSTSGGTAALGCLVKDYFPEPVTVSWNSGALTSGVHTFPAVLQSSGLYSLSSVVTVPSSSLGTQTYICNVNHKPSNTKVDKRVEPKSCDKTHTCPPCPAPEAAGAPSVFLFPPKPKDTLMISRTPEVTCVVVDVSHEDPEVKFNWYVDGVEVHNAKTKPREEQYNSTYRVVSVLTVLHQDWLNGKEYKCKVSNKALPAPIEKTISKAKGQPREPQVYTLPPSREEMTKNQVSLTCLVKGFYPSDIAVEWESNGQPENNYKTTPPVLDSDGSFFLYSKLTVDKSRWQQGNVFSCSVMHEALHNHYTQKSLSLSPG

SEQ ID NO: 331 - protein, 329 aa, synthetic construct
  REGION 1..329: note = Description of Artificial Sequence: Synthetic polypeptide
ASTKGPSVFPLAPSSKSTSGGTAALGCLVKDYFPEPVTVSWNSGALTSGVHTFPAVLQSSGLYSLSSVVTVPSSSLGTQTYICNVNHKPSNTKVDKKVEPKSCDKTHTCPPCPAPEAAGAPSVFLFPPKPKDTLMISRTPEVTCVVVDVSHEDPEVKFNWYVDGVEVHNAKTKPREEQYNSTYRVVSVLTVLHQDWLNGKEYKCKVSNKALPAPIEKTISKAKGQPREPQVYTLPPSREEMTKNQVSLTCLVKGFYPSDIAVEWESNGQPENNYKTTPPVLDSDGSFFLYSKLTVDKSRWQQGNVFSCSVMHEALHNHYTQKSLSLSPG

SEQ ID NO: 332 - protein, 330 aa, synthetic construct
  REGION 1..330: note = Description of Artificial Sequence: Synthetic polypeptide
ASTKGPSVFPLAPSSKSTSGGTAALGCLVKDYFPEPVTVSWNSGALTSGVHTFPAVLQSSGLYSLSSVVTVPSSSLGTQTYICNVNHKPSNTKVDKKVEPKSCDKTHTCPPCPAPEAAGGPSVFLFPPKPKDTLMISRTPEVTCVVVDVSHEDPEVKFNWYVDGVEVHNAKTKPREEQYNSTYRVVSVLTVLHQDWLNGKEYKCKVSNKALGAPIEKTISKAKGQPREPQVYTLPPSRDELTKNQVSLTCLVKGFYPSDIAVEWESNGQPENNYKTTPPVLDSDGSFFLYSKLTVDKSRWQQGNVFSCSVMHEALHNHYTQKSLSLSPGK

SEQ ID NO: 333 - protein, 330 aa, synthetic construct
  REGION 1..330: note = Description of Artificial Sequence: Synthetic polypeptide
ASTKGPSVFPLAPSSKSTSGGTAALGCLVKDYFPEPVTVSWNSGALTSGVHTFPAVLQSSGLYSLSSVVTVPSSSLGTQTYICNVNHKPSNTKVDKRVEPKSCDKTHTCPPCPAPEAAGGPSVFLFPPKPKDTLMISRTPEVTCVVVDVSHEDPEVKFNWYVDGVEVHNAKTKPREEQYNSTYRVVSVLTVLHQDWLNGKEYKCKVSNKALGAPIEKTISKAKGQPREPQVYTLPPSREEMTKNQVSLTCLVKGFYPSDIAVEWESNGQPENNYKTTPPVLDSDGSFFLYSKLTVDKSRWQQGNVFSCSVMHEALHNHYTQKSLSLSPGK

SEQ ID NO: 334 - protein, 330 aa, synthetic construct
  REGION 1..330: note = Description of Artificial Sequence: Synthetic polypeptide
ASTKGPSVFPLAPSSKSTSGGTAALGCLVKDYFPEPVTVSWNSGALTSGVHTFPAVLQSSGLYSLSSVVTVPSSSLGTQTYICNVNHKPSNTKVDKKVEPKSCDKTHTCPPCPAPEAAGGPSVFLFPPKPKDTLMISRTPEVTCVVVDVSHEDPEVKFNWYVDGVEVHNAKTKPREEQYNSTYRVVSVLTVLHQDWLNGKEYKCKVSNKALGAPIEKTISKAKGQPREPQVYTLPPSREEMTKNQVSLTCLVKGFYPSDIAVEWESNGQPENNYKTTPPVLDSDGSFFLYSKLTVDKSRWQQGNVFSCSVMHEALHNHYTQKSLSLSPGK

SEQ ID NO: 335 - protein, 330 aa, synthetic construct
  REGION 1..330: note = Description of Artificial Sequence: Synthetic polypeptide
ASTKGPSVFPLAPSSKSTSGGTAALGCLVKDYFPEPVTVSWNSGALTSGVHTFPAVLQSSGLYSLSSVVTVPSSSLGTQTYICNVNHKPSNTKVDKKVEPKSCDKTHTCPPCPAPEFEGGPSVFLFPPKPKDTLMISRTPEVTCVVVDVSHEDPEVKFNWYVDGVEVHNAKTKPREEQYNSTYRVVSVLTVLHQDWLNGKEYKCKVSNKALPASIEKTISKAKGQPREPQVYTLPPSRDELTKNQVSLTCLVKGFYPSDIAVEWESNGQPENNYKTTPPVLDSDGSFFLYSKLTVDKSRWQQGNVFSCSVMHEALHNHYTQKSLSLSPGK

SEQ ID NO: 336 - protein, 330 aa, synthetic construct
  REGION 1..330: note = Description of Artificial Sequence: Synthetic polypeptide
ASTKGPSVFPLAPSSKSTSGGTAALGCLVKDYFPEPVTVSWNSGALTSGVHTFPAVLQSSGLYSLSSVVTVPSSSLGTQTYICNVNHKPSNTKVDKRVEPKSCDKTHTCPPCPAPEFEGGPSVFLFPPKPKDTLMISRTPEVTCVVVDVSHEDPEVKFNWYVDGVEVHNAKTKPREEQYNSTYRVVSVLTVLHQDWLNGKEYKCKVSNKALPASIEKTISKAKGQPREPQVYTLPPSREEMTKNQVSLTCLVKGFYPSDIAVEWESNGQPENNYKTTPPVLDSDGSFFLYSKLTVDKSRWQQGNVFSCSVMHEALHNHYTQKSLSLSPGK

SEQ ID NO: 337 - protein, 330 aa, synthetic construct
  REGION 1..330: note = Description of Artificial Sequence: Synthetic polypeptide
ASTKGPSVFPLAPSSKSTSGGTAALGCLVKDYFPEPVTVSWNSGALTSGVHTFPAVLQSSGLYSLSSVVTVPSSSLGTQTYICNVNHKPSNTKVDKKVEPKSCDKTHTCPPCPAPEFEGGPSVFLFPPKPKDTLMISRTPEVTCVVVDVSHEDPEVKFNWYVDGVEVHNAKTKPREEQYNSTYRVVSVLTVLHQDWLNGKEYKCKVSNKALPASIEKTISKAKGQPREPQVYTLPPSREEMTKNQVSLTCLVKGFYPSDIAVEWESNGQPENNYKTTPPVLDSDGSFFLYSKLTVDKSRWQQGNVFSCSVMHEALHNHYTQKSLSLSPGK

SEQ ID NO: 338 - protein, 329 aa, synthetic construct
  REGION 1..329: note = Description of Artificial Sequence: Synthetic polypeptide
ASTKGPSVFPLAPSSKSTSGGTAALGCLVKDYFPEPVTVSWNSGALTSGVHTFPAVLQSSGLYSLSSVVTVPSSSLGTQTYICNVNHKPSNTKVDKKVEPKSCDKTHTCPPCPAPEAEGAPSVFLFPPKPKDTLMISRTPEVTCVVVDVSHEDPEVKFNWYVDGVEVHNAKTKPREEQYNSTYRVVSVLTVLHQDWLNGKEYKCKVSNKALPAPIEKTISKAKGQPREPQVYTLPPSRDELTKNQVSLTCLVKGFYPSDIAVEWESNGQPENNYKTTPPVLDSDGSFFLYSKLTVDKSRWQQGNVFSCSVMHEALHNHYTQKSLSLSPG

SEQ ID NO: 339 - protein, 329 aa, synthetic construct
  REGION 1..329: note = Description of Artificial Sequence: Synthetic polypeptide
ASTKGPSVFPLAPSSKSTSGGTAALGCLVKDYFPEPVTVSWNSGALTSGVHTFPAVLQSSGLYSLSSVVTVPSSSLGTQTYICNVNHKPSNTKVDKRVEPKSCDKTHTCPPCPAPEAEGAPSVFLFPPKPKDTLMISRTPEVTCVVVDVSHEDPEVKFNWYVDGVEVHNAKTKPREEQYNSTYRVVSVLTVLHQDWLNGKEYKCKVSNKALPAPIEKTISKAKGQPREPQVYTLPPSREEMTKNQVSLTCLVKGFYPSDIAVEWESNGQPENNYKTTPPVLDSDGSFFLYSKLTVDKSRWQQGNVFSCSVMHEALHNHYTQKSLSLSPG

SEQ ID NO: 340 - protein, 329 aa, synthetic construct
  REGION 1..329: note = Description of Artificial Sequence: Synthetic polypeptide
ASTKGPSVFPLAPSSKSTSGGTAALGCLVKDYFPEPVTVSWNSGALTSGVHTFPAVLQSSGLYSLSSVVTVPSSSLGTQTYICNVNHKPSNTKVDKKVEPKSCDKTHTCPPCPAPEAEGAPSVFLFPPKPKDTLMISRTPEVTCVVVDVSHEDPEVKFNWYVDGVEVHNAKTKPREEQYNSTYRVVSVLTVLHQDWLNGKEYKCKVSNKALPAPIEKTISKAKGQPREPQVYTLPPSREEMTKNQVSLTCLVKGFYPSDIAVEWESNGQPENNYKTTPPVLDSDGSFFLYSKLTVDKSRWQQGNVFSCSVMHEALHNHYTQKSLSLSPG

SEQ ID NO: 341 - protein, 329 aa, synthetic construct
  REGION 1..329: note = Description of Artificial Sequence: Synthetic polypeptide
ASTKGPSVFPLAPSSKSTSGGTAALGCLVKDYFPEPVTVSWNSGALTSGVHTFPAVLQSSGLYSLSSVVTVPSSSLGTQTYICNVNHKPSNTKVDKKVEPKSCDKTHTCPPCPAPEAEGAPSVFLFPPKPKDTLMISRTPEVTCVVVDVSHEDPEVKFNWYVDGVEVHNAKTKPREEQYNSTYRVVSVLTVLHQDWLNGKEYKCKVSNKALPASIEKTISKAKGQPREPQVYTLPPSRDELTKNQVSLTCLVKGFYPSDIAVEWESNGQPENNYKTTPPVLDSDGSFFLYSKLTVDKSRWQQGNVFSCSVMHEALHNHYTQKSLSLSPG

SEQ ID NO: 342 - protein, 329 aa, synthetic construct
  REGION 1..329: note = Description of Artificial Sequence: Synthetic polypeptide
ASTKGPSVFPLAPSSKSTSGGTAALGCLVKDYFPEPVTVSWNSGALTSGVHTFPAVLQSSGLYSLSSVVTVPSSSLGTQTYICNVNHKPSNTKVDKRVEPKSCDKTHTCPPCPAPEAEGAPSVFLFPPKPKDTLMISRTPEVTCVVVDVSHEDPEVKFNWYVDGVEVHNAKTKPREEQYNSTYRVVSVLTVLHQDWLNGKEYKCKVSNKALPASIEKTISKAKGQPREPQVYTLPPSREEMTKNQVSLTCLVKGFYPSDIAVEWESNGQPENNYKTTPPVLDSDGSFFLYSKLTVDKSRWQQGNVFSCSVMHEALHNHYTQKSLSLSPG

SEQ ID NO: 343 - protein, 329 aa, synthetic construct
  REGION 1..329: note = Description of Artificial Sequence: Synthetic polypeptide
ASTKGPSVFPLAPSSKSTSGGTAALGCLVKDYFPEPVTVSWNSGALTSGVHTFPAVLQSSGLYSLSSVVTVPSSSLGTQTYICNVNHKPSNTKVDKKVEPKSCDKTHTCPPCPAPEAEGAPSVFLFPPKPKDTLMISRTPEVTCVVVDVSHEDPEVKFNWYVDGVEVHNAKTKPREEQYNSTYRVVSVLTVLHQDWLNGKEYKCKVSNKALPASIEKTISKAKGQPREPQVYTLPPSREEMTKNQVSLTCLVKGFYPSDIAVEWESNGQPENNYKTTPPVLDSDGSFFLYSKLTVDKSRWQQGNVFSCSVMHEALHNHYTQKSLSLSPG

SEQ ID NO: 344 - protein, 330 aa, synthetic construct
  REGION 1..330: note = Description of Artificial Sequence: Synthetic polypeptide
ASTKGPSVFPLAPSSKSTSGGTAALGCLVKDYFPEPVTVSWNSGALTSGVHTFPAVLQSSGLYSLSSVVTVPSSSLGTQTYICNVNHKPSNTKVDKKVEPKSCDKTHTCPPCPAPEAAGGPSVFLFPPKPKDTLMISRTPEVTCVVVDVSHEDPEVKFNWYVDGVEVHNAKTKPREEQYNSTYRVVSVLTVLHQDWLNGKEYKCKVSNKALAAPIEKTISKAKGQPREPQVYTLPPSRDELTKNQVSLTCLVKGFYPSDIAVEWESNGQPENNYKTTPPVLDSDGSFFLYSKLTVDKSRWQQGNVFSCSVMHEALHNHYTQKSLSLSPGK

SEQ ID NO: 345 - protein, 330 aa, synthetic construct
  REGION 1..330: note = Description of Artificial Sequence: Synthetic polypeptide
ASTKGPSVFPLAPSSKSTSGGTAALGCLVKDYFPEPVTVSWNSGALTSGVHTFPAVLQSSGLYSLSSVVTVPSSSLGTQTYICNVNHKPSNTKVDKRVEPKSCDKTHTCPPCPAPEAAGGPSVFLFPPKPKDTLMISRTPEVTCVVVDVSHEDPEVKFNWYVDGVEVHNAKTKPREEQYNSTYRVVSVLTVLHQDWLNGKEYKCKVSNKALAAPIEKTISKAKGQPREPQVYTLPPSREEMTKNQVSLTCLVKGFYPSDIAVEWESNGQPENNYKTTPPVLDSDGSFFLYSKLTVDKSRWQQGNVFSCSVMHEALHNHYTQKSLSLSPGK

SEQ ID NO: 346 - protein, 330 aa, synthetic construct
  REGION 1..330: note = Description of Artificial Sequence: Synthetic polypeptide
ASTKGPSVFPLAPSSKSTSGGTAALGCLVKDYFPEPVTVSWNSGALTSGVHTFPAVLQSSGLYSLSSVVTVPSSSLGTQTYICNVNHKPSNTKVDKKVEPKSCDKTHTCPPCPAPEAAGGPSVFLFPPKPKDTLMISRTPEVTCVVVDVSHEDPEVKFNWYVDGVEVHNAKTKPREEQYNSTYRVVSVLTVLHQDWLNGKEYKCKVSNKALAAPIEKTISKAKGQPREPQVYTLPPSREEMTKNQVSLTCLVKGFYPSDIAVEWESNGQPENNYKTTPPVLDSDGSFFLYSKLTVDKSRWQQGNVFSCSVMHEALHNHYTQKSLSLSPGK

SEQ ID NO: 347 - protein, 330 aa, synthetic construct
  REGION 1..330: note = Description of Artificial Sequence: Synthetic polypeptide
ASTKGPSVFPLAPSSKSTSGGTAALGCLVKDYFPEPVTVSWNSGALTSGVHTFPAVLQSSGLYSLSSVVTVPSSSLGTQTYICNVNHKPSNTKVDKKVEPKSCDKTHTCPPCPAPELLGGPSVFLFPPKPKDTLMISRTPEVTCVVVAVSHEDPEVKFNWYVDGVEVHNAKTKPREEQYNSTYRVVSVLTVLHQDWLNGKEYKCKVSNKALPAPIEKTISKAKGQPREPQVYTLPPSRDELTKNQVSLTCLVKGFYPSDIAVEWESNGQPENNYKTTPPVLDSDGSFFLYSKLTVDKSRWQQGNVFSCSVMHEALHNHYTQKSLSLSPGK

SEQ ID NO: 348 - protein, 330 aa, synthetic construct
  REGION 1..330: note = Description of Artificial Sequence: Synthetic polypeptide
ASTKGPSVFPLAPSSKSTSGGTAALGCLVKDYFPEPVTVSWNSGALTSGVHTFPAVLQSSGLYSLSSVVTVPSSSLGTQTYICNVNHKPSNTKVDKRVEPKSCDKTHTCPPCPAPELLGGPSVFLFPPKPKDTLMISRTPEVTCVVVAVSHEDPEVKFNWYVDGVEVHNAKTKPREEQYNSTYRVVSVLTVLHQDWLNGKEYKCKVSNKALPAPIEKTISKAKGQPREPQVYTLPPSREEMTKNQVSLTCLVKGFYPSDIAVEWESNGQPENNYKTTPPVLDSDGSFFLYSKLTVDKSRWQQGNVFSCSVMHEALHNHYTQKSLSLSPGK

SEQ ID NO: 349 - protein, 330 aa, synthetic construct
  REGION 1..330: note = Description of Artificial Sequence: Synthetic polypeptide
ASTKGPSVFPLAPSSKSTSGGTAALGCLVKDYFPEPVTVSWNSGALTSGVHTFPAVLQSSGLYSLSSVVTVPSSSLGTQTYICNVNHKPSNTKVDKKVEPKSCDKTHTCPPCPAPELLGGPSVFLFPPKPKDTLMISRTPEVTCVVVAVSHEDPEVKFNWYVDGVEVHNAKTKPREEQYNSTYRVVSVLTVLHQDWLNGKEYKCKVSNKALPAPIEKTISKAKGQPREPQVYTLPPSREEMTKNQVSLTCLVKGFYPSDIAVEWESNGQPENNYKTTPPVLDSDGSFFLYSKLTVDKSRWQQGNVFSCSVMHEALHNHYTQKSLSLSPGK

SEQ ID NO: 350 - protein, 330 aa, synthetic construct
  REGION 1..330: note = Description of Artificial Sequence: Synthetic polypeptide
ASTKGPSVFPLAPSSKSTSGGTAALGCLVKDYFPEPVTVSWNSGALTSGVHTFPAVLQSSGLYSLSSVVTVPSSSLGTQTYICNVNHKPSNTKVDKKVEPKSCDKTHTCPPCPAPELLGGPSVFLFPPKPKDTLMISRTPEVTCVVVDVSHEDPEVKFNWYVDGVEVHNAKTKPREEQYGSTYRVVSVLTVLHQDWLNGKEYKCKVSNKALPAPIEKTISKAKGQPREPQVYTLPPSRDELTKNQVSLTCLVKGFYPSDIAVEWESNGQPENNYKTTPPVLDSDGSFFLYSKLTVDKSRWQQGNVFSCSVMHEALHNHYTQKSLSLSPGK

SEQ ID NO: 351 - protein, 330 aa, synthetic construct
  REGION 1..330: note = Description of Artificial Sequence: Synthetic polypeptide
ASTKGPSVFPLAPSSKSTSGGTAALGCLVKDYFPEPVTVSWNSGALTSGVHTFPAVLQSSGLYSLSSVVTVPSSSLGTQTYICNVNHKPSNTKVDKRVEPKSCDKTHTCPPCPAPELLGGPSVFLFPPKPKDTLMISRTPEVTCVVVDVSHEDPEVKFNWYVDGVEVHNAKTKPREEQYGSTYRVVSVLTVLHQDWLNGKEYKCKVSNKALPAPIEKTISKAKGQPREPQVYTLPPSREEMTKNQVSLTCLVKGFYPSDIAVEWESNGQPENNYKTTPPVLDSDGSFFLYSKLTVDKSRWQQGNVFSCSVMHEALHNHYTQKSLSLSPGK

SEQ ID NO: 352 - protein, 330 aa, synthetic construct
  REGION 1..330: note = Description of Artificial Sequence: Synthetic polypeptide
ASTKGPSVFPLAPSSKSTSGGTAALGCLVKDYFPEPVTVSWNSGALTSGVHTFPAVLQSSGLYSLSSVVTVPSSSLGTQTYICNVNHKPSNTKVDKKVEPKSCDKTHTCPPCPAPELLGGPSVFLFPPKPKDTLMISRTPEVTCVVVDVSHEDPEVKFNWYVDGVEVHNAKTKPREEQYGSTYRVVSVLTVLHQDWLNGKEYKCKVSNKALPAPIEKTISKAKGQPREPQVYTLPPSREEMTKNQVSLTCLVKGFYPSDIAVEWESNGQPENNYKTTPPVLDSDGSFFLYSKLTVDKSRWQQGNVFSCSVMHEALHNHYTQKSLSLSPGK

SEQ ID NO: 353 - protein, 330 aa, synthetic construct
  REGION 1..330: note = Description of Artificial Sequence: Synthetic polypeptide
ASTKGPSVFPLAPSSKSTSGGTAALGCLVKDYFPEPVTVSWNSGALTSGVHTFPAVLQSSGLYSLSSVVTVPSSSLGTQTYICNVNHKPSNTKVDKKVEPKSCDKTHTCPPCPAPELLGGPSVFLFPPKPKDTLMISRTPEVTCVVVAVSHEDPEVKFNWYVDGVEVHNAKTKPREEQYASTYRVVSVLTVLHQDWLNGKEYKCKVSNKALPAPIEKTISKAKGQPREPQVYTLPPSRDELTKNQVSLTCLVKGFYPSDIAVEWESNGQPENNYKTTPPVLDSDGSFFLYSKLTVDKSRWQQGNVFSCSVMHEALHNHYTQKSLSLSPGK

SEQ ID NO: 354 - protein, 330 aa, synthetic construct
  REGION 1..330: note = Description of Artificial Sequence: Synthetic polypeptide
ASTKGPSVFPLAPSSKSTSGGTAALGCLVKDYFPEPVTVSWNSGALTSGVHTFPAVLQSSGLYSLSSVVTVPSSSLGTQTYICNVNHKPSNTKVDKRVEPKSCDKTHTCPPCPAPELLGGPSVFLFPPKPKDTLMISRTPEVTCVVVAVSHEDPEVKFNWYVDGVEVHNAKTKPREEQYASTYRVVSVLTVLHQDWLNGKEYKCKVSNKALPAPIEKTISKAKGQPREPQVYTLPPSREEMTKNQVSLTCLVKGFYPSDIAVEWESNGQPENNYKTTPPVLDSDGSFFLYSKLTVDKSRWQQGNVFSCSVMHEALHNHYTQKSLSLSPGK

SEQ ID NO: 355 - protein, 330 aa, synthetic construct
  REGION 1..330: note = Description of Artificial Sequence: Synthetic polypeptide
ASTKGPSVFPLAPSSKSTSGGTAALGCLVKDYFPEPVTVSWNSGALTSGVHTFPAVLQSSGLYSLSSVVTVPSSSLGTQTYICNVNHKPSNTKVDKKVEPKSCDKTHTCPPCPAPELLGGPSVFLFPPKPKDTLMISRTPEVTCVVVAVSHEDPEVKFNWYVDGVEVHNAKTKPREEQYASTYRVVSVLTVLHQDWLNGKEYKCKVSNKALPAPIEKTISKAKGQPREPQVYTLPPSREEMTKNQVSLTCLVKGFYPSDIAVEWESNGQPENNYKTTPPVLDSDGSFFLYSKLTVDKSRWQQGNVFSCSVMHEALHNHYTQKSLSLSPGK

SEQ ID NO: 356 - protein, 330 aa, synthetic construct
  REGION 1..330: note = Description of Artificial Sequence: Synthetic polypeptide
ASTKGPSVFPLAPSSKSTSGGTAALGCLVKDYFPEPVTVSWNSGALTSGVHTFPAVLQSSGLYSLSSVVTVPSSSLGTQTYICNVNHKPSNTKVDKKVEPKSCDKTHTCPPCPAPELLGGPSVFLFPPKPKDTLMISRTPEVTCVVVAVSHEDPEVKFNWYVDGVEVHNAKTKPREEQYGSTYRVVSVLTVLHQDWLNGKEYKCKVSNKALPAPIEKTISKAKGQPREPQVYTLPPSRDELTKNQVSLTCLVKGFYPSDIAVEWESNGQPENNYKTTPPVLDSDGSFFLYSKLTVDKSRWQQGNVFSCSVMHEALHNHYTQKSLSLSPGK

SEQ ID NO: 357 - protein, 330 aa, synthetic construct
  REGION 1..330: note = Description of Artificial Sequence: Synthetic polypeptide
ASTKGPSVFPLAPSSKSTSGGTAALGCLVKDYFPEPVTVSWNSGALTSGVHTFPAVLQSSGLYSLSSVVTVPSSSLGTQTYICNVNHKPSNTKVDKRVEPKSCDKTHTCPPCPAPELLGGPSVFLFPPKPKDTLMISRTPEVTCVVVAVSHEDPEVKFNWYVDGVEVHNAKTKPREEQYGSTYRVVSVLTVLHQDWLNGKEYKCKVSNKALPAPIEKTISKAKGQPREPQVYTLPPSREEMTKNQVSLTCLVKGFYPSDIAVEWESNGQPENNYKTTPPVLDSDGSFFLYSKLTVDKSRWQQGNVFSCSVMHEALHNHYTQKSLSLSPGK

SEQ ID NO: 358 - protein, 330 aa, synthetic construct
  REGION 1..330: note = Description of Artificial Sequence: Synthetic polypeptide
ASTKGPSVFPLAPSSKSTSGGTAALGCLVKDYFPEPVTVSWNSGALTSGVHTFPAVLQSSGLYSLSSVVTVPSSSLGTQTYICNVNHKPSNTKVDKKVEPKSCDKTHTCPPCPAPELLGGPSVFLFPPKPKDTLMISRTPEVTCVVVAVSHEDPEVKFNWYVDGVEVHNAKTKPREEQYGSTYRVVSVLTVLHQDWLNGKEYKCKVSNKALPAPIEKTISKAKGQPREPQVYTLPPSREEMTKNQVSLTCLVKGFYPSDIAVEWESNGQPENNYKTTPPVLDSDGSFFLYSKLTVDKSRWQQGNVFSCSVMHEALHNHYTQKSLSLSPGK

SEQ ID NO: 359 - protein, 330 aa, synthetic construct
  REGION 1..330: note = Description of Artificial Sequence: Synthetic polypeptide
ASTKGPSVFPLAPSSKSTSGGTAALGCLVKDYFPEPVTVSWNSGALTSGVHTFPAVLQSSGLYSLSSVVTVPSSSLGTQTYICNVNHKPSNTKVDKKVEPKSCDKTHTCPPCPAPELAGAPSVFLFPPKPKDTLMISRTPEVTCVVVDVSHEDPEVKFNWYVDGVEVHNAKTKPREEQYNSTYRVVSVLTVLHQDWLNGKEYKCKVSNKALPAPIEKTISKAKGQPREPQVYTLPPSRDELTKNQVSLTCLVKGFYPSDIAVEWESNGQPENNYKTTPPVLDSDGSFFLYSKLTVDKSRWQQGNVFSCSVMHEALHNHYTQKSLSLSPGK

SEQ ID NO: 360 - protein, 330 aa, synthetic construct
  REGION 1..330: note = Description of Artificial Sequence: Synthetic polypeptide
ASTKGPSVFPLAPSSKSTSGGTAALGCLVKDYFPEPVTVSWNSGALTSGVHTFPAVLQSSGLYSLSSVVTVPSSSLGTQTYICNVNHKPSNTKVDKRVEPKSCDKTHTCPPCPAPELAGAPSVFLFPPKPKDTLMISRTPEVTCVVVDVSHEDPEVKFNWYVDGVEVHNAKTKPREEQYNSTYRVVSVLTVLHQDWLNGKEYKCKVSNKALPAPIEKTISKAKGQPREPQVYTLPPSREEMTKNQVSLTCLVKGFYPSDIAVEWESNGQPENNYKTTPPVLDSDGSFFLYSKLTVDKSRWQQGNVFSCSVMHEALHNHYTQKSLSLSPGK

SEQ ID NO: 361 - protein, 330 aa, synthetic construct
  REGION 1..330: note = Description of Artificial Sequence: Synthetic polypeptide
ASTKGPSVFPLAPSSKSTSGGTAALGCLVKDYFPEPVTVSWNSGALTSGVHTFPAVLQSSGLYSLSSVVTVPSSSLGTQTYICNVNHKPSNTKVDKKVEPKSCDKTHTCPPCPAPELAGAPSVFLFPPKPKDTLMISRTPEVTCVVVDVSHEDPEVKFNWYVDGVEVHNAKTKPREEQYNSTYRVVSVLTVLHQDWLNGKEYKCKVSNKALPAPIEKTISKAKGQPREPQVYTLPPSREEMTKNQVSLTCLVKGFYPSDIAVEWESNGQPENNYKTTPPVLDSDGSFFLYSKLTVDKSRWQQGNVFSCSVMHEALHNHYTQKSLSLSPGK

SEQ ID NO: 362 - protein, 327 aa, synthetic construct
  REGION 1..327: note = Description of Artificial Sequence: Synthetic polypeptide
ASTKGPSVFPLAPCSRSTSESTAALGCLVKDYFPEPVTVSWNSGALTSGVHTFPAVLQSSGLYSLSSVVTVPSSSLGTKTYTCNVDHKPSNTKVDKRVESKYGPPCPSCPAPEFLGGPSVFLFPPKPKDTLMISRTPEVTCVVVDVSQEDPEVQFNWYVDGVEVHNAKTKPREEQFNSTYRVVSVLTVLHQDWLNGKEYKCKVSNKGLPSSIEKTISKAKGQPREPQVYTLPPSQEEMTKNQVSLTCLVKGFYPSDIAVEWESNGQPENNYKTTPPVLDSDGSFFLYSRLTVDKSRWQEGNVFSCSVMHEALHNHYTQKSLSLSLGK

SEQ ID NO: 363-400 - skipped (38 entries)

SEQ ID NO: 401 - protein, 330 aa, synthetic construct; identical to SEQ ID NO: 326
  REGION 1..330: note = Description of Artificial Sequence: Synthetic polypeptide

SEQ ID NO: 402 - protein, 330 aa, synthetic construct; identical to SEQ ID NO: 323
  REGION 1..330: note = Description of Artificial Sequence: Synthetic polypeptide

SEQ ID NO: 403 - protein, 330 aa, synthetic construct
  REGION 1..330: note = Description of Artificial Sequence: Synthetic polypeptide
ASTKGPSVFPLAPSSKSTSGGTAALGCLVKDYFPEPVTVSWNSGALTSGVHTFPAVLQSSGLYSLSSVVTVPSSSLGTQTYICNVNHKPSNTKVDKKVEPKSCDKTHTCPPCPAPEAAGAPSVFLFPPKPKDTLMISRTPEVTCVVVDVSHEDPEVKFNWYVDGVEVHNAKTKPREEQYNSTYRVVSVLTVLHQDWLNGKEYKCKVSNKALPAPIEKTISKAKGQPREPQVYTLPPSRDELTKNQVSLTCLVKGFYPSDIAVEWESNGQPENNYKTTPPVLDSDGSFFLYSKLTVDKSRWQQGNVFSCSVMHEALHNHYTQKSLSLSPGK

SEQ ID NO: 404 - protein, 330 aa, synthetic construct
  REGION 1..330: note = Description of Artificial Sequence: Synthetic polypeptide
ASTKGPSVFPLAPSSKSTSGGTAALGCLVKDYFPEPVTVSWNSGALTSGVHTFPAVLQSSGLYSLSSVVTVPSSSLGTQTYICNVNHKPSNTKVDKKVEPKSCDKTHTCPPCPAPEAEGAPSVFLFPPKPKDTLMISRTPEVTCVVVDVSHEDPEVKFNWYVDGVEVHNAKTKPREEQYNSTYRVVSVLTVLHQDWLNGKEYKCKVSNKALPAPIEKTISKAKGQPREPQVYTLPPSRDELTKNQVSLTCLVKGFYPSDIAVEWESNGQPENNYKTTPPVLDSDGSFFLYSKLTVDKSRWQQGNVFSCSVMHEALHNHYTQKSLSLSPGK

SEQ ID NO: 405 - protein, 330 aa, synthetic construct; identical to SEQ ID NO: 344
  REGION 1..330: note = Description of Artificial Sequence: Synthetic polypeptide

SEQ ID NO: 406 - protein, 330 aa, synthetic construct; identical to SEQ ID NO: 344
  REGION 1..330: note = Description of Artificial Sequence: Synthetic polypeptide

SEQ ID NO: 407 - protein, 330 aa, synthetic construct; identical to SEQ ID NO: 344
  REGION 1..330: note = Description of Artificial Sequence: Synthetic polypeptide

SEQ ID NO: 408 - protein, 330 aa, synthetic construct
  REGION 1..330: note = Description of Artificial Sequence: Synthetic polypeptide
ASTKGPSVFPLAPSSKSTSGGTAALGCLVKDYFPEPVTVSWNSGALTSGVHTFPAVLQSSGLYSLSSVVTVPSSSLGTQTYICNVNHKPSNTKVDKKVEPKSCDKTHTCPPCPAPEEFGGPSVFLFPPKPKDTLMISRTPEVTCVVVDVSHEDPEVKFNWYVDGVEVHNAKTKPREEQYNSTYRVVSVLTVLHQDWLNGKEYKCKVSNKALPASIEKTISKAKGQPREPQVYTLPPSRDELTKNQVSLTCLVKGFYPSDIAVEWESNGQPENNYKTTPPVLDSDGSFFLYSKLTVDKSRWQQGNVFSCSVMHEALHNHYTQKSLSLSPGK

SEQ ID NO: 409 - protein, 330 aa, synthetic construct; identical to SEQ ID NO: 356
  REGION 1..330: note = Description of Artificial Sequence: Synthetic polypeptide

SEQ ID NO: 410 - protein, 330 aa, synthetic construct; identical to SEQ ID NO: 350
  REGION 1..330: note = Description of Artificial Sequence: Synthetic polypeptide

SEQ ID NO: 411 - protein, 327 aa, synthetic construct
  REGION 1..327: note = Description of Artificial Sequence: Synthetic polypeptide
ASTKGPSVFPLAPCSRSTSESTAALGCLVKDYFPEPVTVSWNSGALTSGVHTFPAVLQSSGLYSLSSVVTVPSSSLGTKTYTCNVDHKPSNTKVDKRVESKYGPPCPPCPAPEFLGGPSVFLFPPKPKDTLMISRTPEVTCVVVDVSQEDPEVQFNWYVDGVEVHNAKTKPREEQFNSTYRVVSVLTVLHQDWLNGKEYKCKVSNKGLPSSIEKTISKAKGQPREPQVYTLPPSQEEMTKNQVSLTCLVKGFYPSDIAVEWESNGQPENNYKTTPPVLDSDGSFFLYSRLTVDKSRWQEGNVFSCSVMHEALHNHYTQKSLSLSLGK

SEQ ID NO: 412 - protein, 327 aa, synthetic construct
  REGION 1..327: note = Description of Artificial Sequence: Synthetic polypeptide
ASTKGPSVFPLAPCSRSTSESTAALGCLVKDYFPEPVTVSWNSGALTSGVHTFPAVLQSSGLYSLSSVVTVPSSSLGTKTYTCNVDHKPSNTKVDKRVESKYGPPCPPCPAPEFEGGPSVFLFPPKPKDTLMISRTPEVTCVVVDVSQEDPEVQFNWYVDGVEVHNAKTKPREEQFNSTYRVVSVLTVLHQDWLNGKEYKCKVSNKGLPSSIEKTISKAKGQPREPQVYTLPPSQEEMTKNQVSLTCLVKGFYPSDIAVEWESNGQPENNYKTTPPVLDSDGSFFLYSRLTVDKSRWQEGNVFSCSVMHEALHNHYTQKSLSLSLGK

SEQ ID NO: 413 - protein, 327 aa, synthetic construct
  REGION 1..327: note = Description of Artificial Sequence: Synthetic polypeptide
ASTKGPSVFPLAPCSRSTSESTAALGCLVKDYFPEPVTVSWNSGALTSGVHTFPAVLQSSGLYSLSSVVTVPSSSLGTKTYTCNVDHKPSNTKVDKRVESKYGPPCPPCPAPEAAGGPSVFLFPPKPKDTLMISRTPEVTCVVVDVSQEDPEVQFNWYVDGVEVHNAKTKPREEQFNSTYRVVSVLTVLHQDWLNGKEYKCKVSNKGLPSSIEKTISKAKGQPREPQVYTLPPSQEEMTKNQVSLTCLVKGFYPSDIAVEWESNGQPENNYKTTPPVLDSDGSFFLYSRLTVDKSRWQEGNVFSCSVMHEALHNHYTQKSLSLSLGK

SEQ ID NO: 414-500 - skipped (87 entries)

SEQ ID NO: 501 - protein, 446 aa, synthetic construct
  REGION 1..446: note = Description of Artificial Sequence: Synthetic polypeptide
QVQLVQSGAEVKKPGASVKVSCKASGFDIQDTYMHWVKQRPGQGLEWMGRIDPASGHTKYDPKFQVRVTITRDTSTSTVYLELSSLRSEDTAVYYCARSGGLPDVWGQGTTVTVSSASTKGPSVFPLAPSSKSTSGGTAALGCLVKDYFPEPVTVSWNSGALTSGVHTFPAVLQSSGLYSLSSVVTVPSSSLGTQTYICNVNHKPSNTKVDKKVEPKSCDKTHTCPPCPAPEAAGGPSVFLFPPKPKDTLMISRTPEVTCVVVDVSHEDPEVKFNWYVDGVEVHNAKTKPREEQYNSTYRVVSVLTVLHQDWLNGKEYKCKVSNKALPAPIEKTISKAKGQPREPQVYTLPPSRDELTKNQVSLTCLVKGFYPSDIAVEWESNGQPENNYKTTPPVLDSDGSFFLYSKLTVDKSRWQQGNVFSCSVMHEALHNHYTQKSLSLSPGK

SEQ ID NO: 502 - protein, 446 aa, synthetic construct
  REGION 1..446: note = Description of Artificial Sequence: Synthetic polypeptide
QVQLVQSGAEVKKPGASVKVSCKASGFDIQDTYMHWVKQRPGQGLEWMGRIDPASGHTKYDPKFQVRVTITRDTSTSTVYLELSSLRSEDTAVYYCARSGGLPDVWGQGTTVTVSSASTKGPSVFPLAPSSKSTSGGTAALGCLVKDYFPEPVTVSWNSGALTSGVHTFPAVLQSSGLYSLSSVVTVPSSSLGTQTYICNVNHKPSNTKVDKKVEPKSCDKTHTCPPCPAPELEGGPSVFLFPPKPKDTLMISRTPEVTCVVVDVSHEDPEVKFNWYVDGVEVHNAKTKPREEQYNSTYRVVSVLTVLHQDWLNGKEYKCKVSNKALPAPIEKTISKAKGQPREPQVYTLPPSRDELTKNQVSLTCLVKGFYPSDIAVEWESNGQPENNYKTTPPVLDSDGSFFLYSKLTVDKSRWQQGNVFSCSVMHEALHNHYTQKSLSLSPGK

SEQ ID NO: 503 - protein, 446 aa, synthetic construct
  REGION 1..446: note = Description of Artificial Sequence: Synthetic polypeptide
QVQLVQSGAEVKKPGASVKVSCKASGFDIQDTYMHWVKQRPGQGLEWMGRIDPASGHTKYDPKFQVRVTITRDTSTSTVYLELSSLRSEDTAVYYCARSGGLPDVWGQGTTVTVSSASTKGPSVFPLAPSSKSTSGGTAALGCLVKDYFPEPVTVSWNSGALTSGVHTFPAVLQSSGLYSLSSVVTVPSSSLGTQTYICNVNHKPSNTKVDKKVEPKSCDKTHTCPPCPAPEAAGAPSVFLFPPKPKDTLMISRTPEVTCVVVDVSHEDPEVKFNWYVDGVEVHNAKTKPREEQYNSTYRVVSVLTVLHQDWLNGKEYKCKVSNKALPAPIEKTISKAKGQPREPQVYTLPPSRDELTKNQVSLTCLVKGFYPSDIAVEWESNGQPENNYKTTPPVLDSDGSFFLYSKLTVDKSRWQQGNVFSCSVMHEALHNHYTQKSLSLSPGK

SEQ ID NO: 504 - protein, 446 aa, synthetic construct
  REGION 1..446: note = Description of Artificial Sequence: Synthetic polypeptide
QVQLVQSGAEVKKPGASVKVSCKASGFDIQDTYMHWVKQRPGQGLEWMGRIDPASGHTKYDPKFQVRVTITRDTSTSTVYLELSSLRSEDTAVYYCARSGGLPDVWGQGTTVTVSSASTKGPSVFPLAPSSKSTSGGTAALGCLVKDYFPEPVTVSWNSGALTSGVHTFPAVLQSSGLYSLSSVVTVPSSSLGTQTYICNVNHKPSNTKVDKKVEPKSCDKTHTCPPCPAPEAEGAPSVFLFPPKPKDTLMISRTPEVTCVVVDVSHEDPEVKFNWYVDGVEVHNAKTKPREEQYNSTYRVVSVLTVLHQDWLNGKEYKCKVSNKALPAPIEKTISKAKGQPREPQVYTLPPSRDELTKNQVSLTCLVKGFYPSDIAVEWESNGQPENNYKTTPPVLDSDGSFFLYSKLTVDKSRWQQGNVFSCSVMHEALHNHYTQKSLSLSPGK

SEQ ID NO: 505 - protein, 446 aa, synthetic construct
  REGION 1..446: note = Description of Artificial Sequence: Synthetic polypeptide
QVQLVQSGAEVKKPGASVKVSCKASGFDIQDTYMHWVKQRPGQGLEWMGRIDPASGHTKYDPKFQVRVTITRDTSTSTVYLELSSLRSEDTAVYYCARSGGLPDVWGQGTTVTVSSASTKGPSVFPLAPSSKSTSGGTAALGCLVKDYFPEPVTVSWNSGALTSGVHTFPAVLQSSGLYSLSSVVTVPSSSLGTQTYICNVNHKPSNTKVDKKVEPKSCDKTHTCPPCPAPEAAGGPSVFLFPPKPKDTLMISRTPEVTCVVVDVSHEDPEVKFNWYVDGVEVHNAKTKPREEQYNSTYRVVSVLTVLHQDWLNGKEYKCKVSNKALAAPIEKTISKAKGQPREPQVYTLPPSRDELTKNQVSLTCLVKGFYPSDIAVEWESNGQPENNYKTTPPVLDSDGSFFLYSKLTVDKSRWQQGNVFSCSVMHEALHNHYTQKSLSLSPGK

SEQ ID NO: 506 - protein, 446 aa, synthetic construct; identical to SEQ ID NO: 505
  REGION 1..446: note = Description of Artificial Sequence: Synthetic polypeptide

SEQ ID NO: 507 - protein, 446 aa, synthetic construct; identical to SEQ ID NO: 505
  REGION 1..446: note = Description of Artificial Sequence: Synthetic polypeptide

SEQ ID NO: 508 - protein, 446 aa, synthetic construct
  REGION 1..446: note = Description of Artificial Sequence: Synthetic polypeptide
QVQLVQSGAEVKKPGASVKVSCKASGFDIQDTYMHWVKQRPGQGLEWMGRIDPASGHTKYDPKFQVRVTITRDTSTSTVYLELSSLRSEDTAVYYCARSGGLPDVWGQGTTVTVSSASTKGPSVFPLAPSSKSTSGGTAALGCLVKDYFPEPVTVSWNSGALTSGVHTFPAVLQSSGLYSLSSVVTVPSSSLGTQTYICNVNHKPSNTKVDKKVEPKSCDKTHTCPPCPAPEEFGGPSVFLFPPKPKDTLMISRTPEVTCVVVDVSHEDPEVKFNWYVDGVEVHNAKTKPREEQYNSTYRVVSVLTVLHQDWLNGKEYKCKVSNKALPASIEKTISKAKGQPREPQVYTLPPSRDELTKNQVSLTCLVKGFYPSDIAVEWESNGQPENNYKTTPPVLDSDGSFFLYSKLTVDKSRWQQGNVFSCSVMHEALHNHYTQKSLSLSPGK

SEQ ID NO: 509 - protein, 446 aa, synthetic construct
  REGION 1..446: note = Description of Artificial Sequence: Synthetic polypeptide
QVQLVQSGAEVKKPGASVKVSCKASGFDIQDTYMHWVKQRPGQGLEWMGRIDPASGHTKYDPKFQVRVTITRDTSTSTVYLELSSLRSEDTAVYYCARSGGLPDVWGQGTTVTVSSASTKGPSVFPLAPSSKSTSGGTAALGCLVKDYFPEPVTVSWNSGALTSGVHTFPAVLQSSGLYSLSSVVTVPSSSLGTQTYICNVNHKPSNTKVDKKVEPKSCDKTHTCPPCPAPELLGGPSVFLFPPKPKDTLMISRTPEVTCVVVAVSHEDPEVKFNWYVDGVEVHNAKTKPREEQYGSTYRVVSVLTVLHQDWLNGKEYKCKVSNKALPAPIEKTISKAKGQPREPQVYTLPPSRDELTKNQVSLTCLVKGFYPSDIAVEWESNGQPENNYKTTPPVLDSDGSFFLYSKLTVDKSRWQQGNVFSCSVMHEALHNHYTQKSLSLSPGK

SEQ ID NO: 510 - protein, 446 aa, synthetic construct
  REGION 1..446: note = Description of Artificial Sequence: Synthetic polypeptide
QVQLVQSGAEVKKPGASVKVSCKASGFDIQDTYMHWVKQRPGQGLEWMGRIDPASGHTKYDPKFQVRVTITRDTSTSTVYLELSSLRSEDTAVYYCARSGGLPDVWGQGTTVTVSSASTKGPSVFPLAPSSKSTSGGTAALGCLVKDYFPEPVTVSWNSGALTSGVHTFPAVLQSSGLYSLSSVVTVPSSSLGTQTYICNVNHKPSNTKVDKKVEPKSCDKTHTCPPCPAPELLGGPSVFLFPPKPKDTLMISRTPEVTCVVVDVSHEDPEVKFNWYVDGVEVHNAKTKPREEQYGSTYRVVSVLTVLHQDWLNGKEYKCKVSNKALPAPIEKTISKAKGQPREPQVYTLPPSRDELTKNQVSLTCLVKGFYPSDIAVEWESNGQPENNYKTTPPVLDSDGSFFLYSKLTVDKSRWQQGNVFSCSVMHEALHNHYTQKSLSLSPGK

SEQ ID NO: 511 - protein, 443 aa, synthetic construct
  REGION 1..443: note = Description of Artificial Sequence: Synthetic polypeptide
QVQLVQSGAEVKKPGASVKVSCKASGFDIQDTYMHWVKQRPGQGLEWMGRIDPASGHTKYDPKFQVRVTITRDTSTSTVYLELSSLRSEDTAVYYCARSGGLPDVWGQGTTVTVSSASTKGPSVFPLAPCSRSTSESTAALGCLVKDYFPEPVTVSWNSGALTSGVHTFPAVLQSSGLYSLSSVVTVPSSSLGTKTYTCNVDHKPSNTKVDKRVESKYGPPCPPCPAPEFLGGPSVFLFPPKPKDTLMISRTPEVTCVVVDVSQEDPEVQFNWYVDGVEVHNAKTKPREEQFNSTYRVVSVLTVLHQDWLNGKEYKCKVSNKGLPSSIEKTISKAKGQPREPQVYTLPPSQEEMTKNQVSLTCLVKGFYPSDIAVEWESNGQPENNYKTTPPVLDSDGSFFLYSRLTVDKSRWQEGNVFSCSVMHEALHNHYTQKSLSLSLGK

SEQ ID NO: 512 - protein, 443 aa, synthetic construct
  REGION 1..443: note = Description of Artificial Sequence: Synthetic polypeptide
QVQLVQSGAEVKKPGASVKVSCKASGFDIQDTYMHWVKQRPGQGLEWMGRIDPASGHTKYDPKFQVRVTITRDTSTSTVYLELSSLRSEDTAVYYCARSGGLPDVWGQGTTVTVSSASTKGPSVFPLAPCSRSTSESTAALGCLVKDYFPEPVTVSWNSGALTSGVHTFPAVLQSSGLYSLSSVVTVPSSSLGTKTYTCNVDHKPSNTKVDKRVESKYGPPCPPCPAPEFEGGPSVFLFPPKPKDTLMISRTPEVTCVVVDVSQEDPEVQFNWYVDGVEVHNAKTKPREEQFNSTYRVVSVLTVLHQDWLNGKEYKCKVSNKGLPSSIEKTISKAKGQPREPQVYTLPPSQEEMTKNQVSLTCLVKGFYPSDIAVEWESNGQPENNYKTTPPVLDSDGSFFLYSRLTVDKSRWQEGNVFSCSVMHEALHNHYTQKSLSLSLGK

SEQ ID NO: 513 - protein, 443 aa, synthetic construct
  REGION 1..443: note = Description of Artificial Sequence: Synthetic polypeptide
QVQLVQSGAEVKKPGASVKVSCKASGFDIQDTYMHWVKQRPGQGLEWMGRIDPASGHTKYDPKFQVRVTITRDTSTSTVYLELSSLRSEDTAVYYCARSGGLPDVWGQGTTVTVSSASTKGPSVFPLAPCSRSTSESTAALGCLVKDYFPEPVTVSWNSGALTSGVHTFPAVLQSSGLYSLSSVVTVPSSSLGTKTYTCNVDHKPSNTKVDKRVESKYGPPCPPCPAPEAAGGPSVFLFPPKPKDTLMISRTPEVTCVVVDVSQEDPEVQFNWYVDGVEVHNAKTKPREEQFNSTYRVVSVLTVLHQDWLNGKEYKCKVSNKGLPSSIEKTISKAKGQPREPQVYTLPPSQEEMTKNQVSLTCLVKGFYPSDIAVEWESNGQPENNYKTTPPVLDSDGSFFLYSRLTVDKSRWQEGNVFSCSVMHEALHNHYTQKSLSLSLGK

SEQ ID NO: 514 - protein, 213 aa, synthetic construct
  REGION 1..213: note = Description of Artificial Sequence: Synthetic polypeptide
EIVLTQSPGTLSLSPGERATLSCRASSSVSYMYWYQQKPGQAPRPLIYATSNLASGIPDRFSGSGSGTDFTLTISRLEPEDFAVYYCQQWEGNPRTFGGGTKLEIKRTVAAPSVFIFPPSDEQLKSGTASVVCLLNNFYPREAKVQWKVDNALQSGNSQESVTEQDSKDSTYSLSSTLTLSKADYEKHKVYACEVTHQGLSSPVTKSFNRGEC

SEQ ID NO: 515 - protein, 326 aa, synthetic construct
  REGION 1..326: note = Description of Artificial Sequence: Synthetic polypeptide
ASTKGPSVFPLAPCSRSTSESTAALGCLVKDYFPEPVTVSWNSGALTSGVHTFPAVLQSSGLYSLSSVVTVPSSNFGTQTYTCNVDHKPSNTKVDKTVERKCCVECPPCPAPPVAGPSVFLFPPKPKDTLMISRTPEVTCVVVDVSHEDPEVQFNWYVDGVEVHNAKTKPREEQFNSTFRVVSVLTVVHQDWLNGKEYKCKVSNKGLPAPIEKTISKTKGQPREPQVYTLPPSREEMTKNQVSLTCLVKGFYPSDIAVEWESNGQPENNYKTTPPMLDSDGSFFLYSKLTVDKSRWQQGNVFSCSVMHEALHNHYTQKSLSLSPGK

SEQ ID NO: 516-600 - skipped (85 entries)

SEQ ID NO: 601 - protein, 5 aa, synthetic construct
  REGION 1..5: note = Description of Artificial Sequence: Synthetic peptide
DTYMH

SEQ ID NO: 602 - protein, 5 aa, synthetic construct
  REGION 1..5: note = Description of Artificial Sequence: Synthetic peptide
KYDIN

SEQ ID NO: 603 - protein, 10 aa, synthetic construct
  REGION 1..10: note = Description of Artificial Sequence: Synthetic peptide
GFEIQDTYMH

SEQ ID NO: 604 - protein, 10 aa, synthetic construct
  REGION 1..10: note = Description of Artificial Sequence: Synthetic peptide
GFDPQDTYMH

SEQ ID NO: 605 - protein, 10 aa, synthetic construct
  REGION 1..10: note = Description of Artificial Sequence: Synthetic peptide
GFDVQDTYMH

SEQ ID NO: 606 - protein, 10 aa, synthetic construct
  REGION 1..10: note = Description of Artificial Sequence: Synthetic peptide
GFDIGDTYMH

SEQ ID NO: 607 - protein, 10 aa, synthetic construct
  REGION 1..10: note = Description of Artificial Sequence: Synthetic peptide
GFDISDTYMH

SEQ ID NO: 608 - protein, 10 aa, synthetic construct
  REGION 1..10: note = Description of Artificial Sequence: Synthetic peptide
GFDIVDTYMH

SEQ ID NO: 609 - protein, 10 aa, synthetic construct
  REGION 1..10: note = Description of Artificial Sequence: Synthetic peptide
GFDIQDAYMH

SEQ ID NO: 610 - protein, 10 aa, synthetic construct
  REGION 1..10: note = Description of Artificial Sequence: Synthetic peptide
GFDIQDSYMH

SEQ ID NO: 611 - protein, 10 aa, synthetic construct
  REGION 1..10: note = Description of Artificial Sequence: Synthetic peptide
GFDIQDTFMH

SEQ ID NO: 612 - protein, 10 aa, synthetic construct
  REGION 1..10: note = Description of Artificial Sequence: Synthetic peptide
GFDIQDTYIH

SEQ ID NO: 613 - protein, 10 aa, synthetic construct
  REGION 1..10: note = Description of Artificial Sequence: Synthetic peptide
GFDLQDTYMH

SEQ ID NO: 614 - protein, 10 aa, synthetic construct
  REGION 1..10: note = Description of Artificial Sequence: Synthetic peptide
GFDIQDTYLH

SEQ ID NO: 615 - protein, 10 aa, synthetic construct
  REGION 1..10: note = Description of Artificial Sequence: Synthetic peptide
GFDIGDTFIH

SEQ ID NO: 616 - protein, 10 aa, synthetic construct
  REGION 1..10: note = Description of Artificial Sequence: Synthetic peptide
GFDIGDTFMH

SEQ ID NO: 617 - protein, 10 aa, synthetic construct
  REGION 1..10: note = Description of Artificial Sequence: Synthetic peptide
GFDIGDTYIH

SEQ ID NO: 618 - protein, 10 aa, synthetic construct
  REGION 1..10: note = Description of Artificial Sequence: Synthetic peptide
GFDIQDTFIH

SEQ ID NO: 619 - protein, 10 aa, synthetic construct
  REGION 1..10: note = Description of Artificial Sequence: Synthetic peptide
GFDIQDTFMH

SEQ ID NO: 620 - protein, 10 aa, synthetic construct
  REGION 1..10: note = Description of Artificial Sequence: Synthetic peptide
GFDIQDTYIH

SEQ ID NO: 621 - protein, 10 aa, synthetic construct
  REGION 1..10: note = Description of Artificial Sequence: Synthetic peptide
GFDISDTFIH

SEQ ID NO: 622 - protein, 10 aa, synthetic construct
  REGION 1..10: note = Description of Artificial Sequence: Synthetic peptide
GFDISDTFMH

SEQ ID NO: 623 - protein, 10 aa, synthetic construct
  REGION 1..10: note = Description of Artificial Sequence: Synthetic peptide
GFDISDTYIH

SEQ ID NO: 624 - protein, 10 aa, synthetic construct
  REGION 1..10: note = Description of Artificial Sequence: Synthetic peptide
GFDISDTYMH

SEQ ID NO: 625 - protein, 10 aa, synthetic construct
  REGION 1..10: note = Description of Artificial Sequence: Synthetic peptide
GFDIVDTFIH

SEQ ID NO: 626 - protein, 10 aa, synthetic construct
  REGION 1..10: note = Description of Artificial Sequence: Synthetic peptide
GFDIVDTFMH

SEQ ID NO: 627 - protein, 10 aa, synthetic construct
  REGION 1..10: note = Description of Artificial Sequence: Synthetic peptide
GFDIVDTYIH

SEQ ID NO: 628 - protein, 10 aa, synthetic construct
  REGION 1..10: note = Description of Artificial Sequence: Synthetic peptide
GFDPGDTFIH

SEQ ID NO: 629 - protein, 10 aa, synthetic construct
  REGION 1..10: note = Description of Artificial Sequence: Synthetic peptide
GFDPGDTFMH

SEQ ID NO: 630 - protein, 10 aa, synthetic construct
  REGION 1..10: note = Description of Artificial Sequence: Synthetic peptide
GFDPGDTYIH

SEQ ID NO: 631 - protein, 10 aa, synthetic construct
  REGION 1..10: note = Description of Artificial Sequence: Synthetic peptide
GFDPGDTYMH

SEQ ID NO: 632 - protein, 10 aa, synthetic construct
  REGION 1..10: note = Description of Artificial Sequence: Synthetic peptide
GFDPQDTFIH

SEQ ID NO: 633 - protein, 10 aa, synthetic construct
  REGION 1..10: note = Description of Artificial Sequence: Synthetic peptide
GFDPQDTFMH

SEQ ID NO: 634 - protein, 10 aa, synthetic construct
  REGION 1..10: note = Description of Artificial Sequence: Synthetic peptide
GFDPQDTYIH

SEQ ID NO: 635 - protein, 10 aa, synthetic construct
  REGION 1..10: note = Description of Artificial Sequence: Synthetic peptide
GFDPQDTYMH

SEQ ID NO: 636 - protein, 10 aa, synthetic construct
  REGION 1..10: note = Description of Artificial Sequence: Synthetic peptide
GFDPSDTFIH

SEQ ID NO: 637 - protein, 10 aa, synthetic construct
  REGION 1..10: note = Description of Artificial Sequence: Synthetic peptide
GFDPSDTFMH

SEQ ID NO: 638 - protein, 10 aa, synthetic construct
  REGION 1..10: note = Description of Artificial Sequence: Synthetic peptide
GFDPSDTYIH

SEQ ID NO: 639 - protein, 10 aa, synthetic construct
  REGION 1..10: note = Description of Artificial Sequence: Synthetic peptide
GFDPSDTYMH

SEQ ID NO: 640 - protein, 10 aa, synthetic construct
  REGION 1..10: note = Description of Artificial Sequence: Synthetic peptide
GFDPVDTFIH

SEQ ID NO: 641 - protein, 10 aa, synthetic construct
  REGION 1..10: note = Description of Artificial Sequence: Synthetic peptide
GFDPVDTFMH

SEQ ID NO: 642 - protein, 10 aa, synthetic construct
  REGION 1..10: note = Description of Artificial Sequence: Synthetic peptide
GFDPVDTYIH

SEQ ID NO: 643 - protein, 10 aa, synthetic construct
  REGION 1..10: note = Description of Artificial Sequence: Synthetic peptide
GFDPVDTYMH

SEQ ID NO: 644 - protein, 10 aa, synthetic construct
  REGION 1..10: note = Description of Artificial Sequence: Synthetic peptide
GFDVGDTFIH

SEQ ID NO: 645 - protein, 10 aa, synthetic construct
  REGION 1..10: note = Description of Artificial Sequence: Synthetic peptide
GFDVGDTFMH

SEQ ID NO: 646 - protein, 10 aa, synthetic construct
  REGION 1..10: note = Description of Artificial Sequence: Synthetic peptide
GFDVGDTYIH

SEQ ID NO: 647 - protein, 10 aa, synthetic construct
  REGION 1..10: note = Description of Artificial Sequence: Synthetic peptide
GFDVGDTYMH

SEQ ID NO: 648 - protein, 10 aa, synthetic construct
  REGION 1..10: note = Description of Artificial Sequence: Synthetic peptide
GFDVQDTFIH

SEQ ID NO: 649 - protein, 10 aa, synthetic construct
  REGION 1..10: note = Description of Artificial Sequence: Synthetic peptide
GFDVQDTFMH

SEQ ID NO: 650 - protein, 10 aa, synthetic construct
  REGION 1..10: note = Description of Artificial Sequence: Synthetic peptide
GFDVQDTYIH

SEQ ID NO: 651 - protein, 10 aa, synthetic construct
  REGION 1..10: note = Description of Artificial Sequence: Synthetic peptide
GFDVSDTFIH

SEQ ID NO: 652 - protein, 10 aa, synthetic construct
  REGION 1..10: note = Description of Artificial Sequence: Synthetic peptide
GFDVSDTFMH

SEQ ID NO: 653 - protein, 10 aa, synthetic construct
  REGION 1..10: note = Description of Artificial Sequence: Synthetic peptide
GFDVSDTYIH

SEQ ID NO: 654 - protein, 10 aa, synthetic construct
  REGION 1..10: note = Description of Artificial Sequence: Synthetic peptide
GFDVSDTYMH

SEQ ID NO: 655 - protein, 10 aa, synthetic construct
  REGION 1..10: note = Description of Artificial Sequence: Synthetic peptide
GFDVVDTFIH

SEQ ID NO: 656 - protein, 10 aa, synthetic construct
  REGION 1..10: note = Description of Artificial Sequence: Synthetic peptide
GFDVVDTFMH

SEQ ID NO: 657 - protein, 10 aa, synthetic construct
  REGION 1..10: note = Description of Artificial Sequence: Synthetic peptide
GFDVVDTYIH

SEQ ID NO: 658 - protein, 10 aa, synthetic construct
  REGION 1..10: note = Description of Artificial Sequence: Synthetic peptide
GFDVVDTYMH

SEQ ID NO: 659 - protein, 10 aa, synthetic construct
  REGION 1..10: note = Description of Artificial Sequence: Synthetic peptide
GFEIGDTFIH

SEQ ID NO: 660 - protein, 10 aa, synthetic construct
  REGION 1..10: note = Description of Artificial Sequence: Synthetic peptide
GFEIGDTFMH

SEQ ID NO: 661 - protein, 10 aa, synthetic construct
  REGION 1..10: note = Description of Artificial Sequence: Synthetic peptide
GFEIGDTYIH

SEQ ID NO: 662 - protein, 10 aa, synthetic construct
  REGION 1..10: note = Description of Artificial Sequence: Synthetic peptide
GFEIGDTYMH

SEQ ID NO: 663 - protein, 10 aa, synthetic construct
  REGION 1..10: note = Description of Artificial Sequence: Synthetic peptide
GFEIQDTFIH

SEQ ID NO: 664 - protein, 10 aa, synthetic construct
  REGION 1..10: note = Description of Artificial Sequence: Synthetic peptide
GFEIQDTFMH

SEQ ID NO: 665 - protein, 10 aa, synthetic construct
  REGION 1..10: note = Description of Artificial Sequence: Synthetic peptide
GFEIQDTYIH

SEQ ID NO: 666 - protein, 10 aa, synthetic construct
  REGION 1..10: note = Description of Artificial Sequence: Synthetic peptide
GFEIQDTYMH

SEQ ID NO: 667 - protein, 10 aa, synthetic construct
  REGION 1..10: note = Description of Artificial Sequence: Synthetic peptide
GFEISDTFIH

SEQ ID NO: 668 - protein, 10 aa, synthetic construct
  REGION 1..10: note = Description of Artificial Sequence: Synthetic peptide
GFEISDTFMH

SEQ ID NO: 669 - protein, 10 aa, synthetic construct
  REGION 1..10: note = Description of Artificial Sequence: Synthetic peptide
GFEISDTYIH

SEQ ID NO: 670 - protein, 10 aa, synthetic construct
  REGION 1..10: note = Description of Artificial Sequence: Synthetic peptide
GFEISDTYMH

SEQ ID NO: 671 - protein, 10 aa, synthetic construct
  REGION 1..10: note = Description of Artificial Sequence: Synthetic peptide
GFEIVDTFIH

SEQ ID NO: 672 - protein, 10 aa, synthetic construct
  REGION 1..10: note = Description of Artificial Sequence: Synthetic peptide
GFEIVDTFMH

SEQ ID NO: 673 - protein, 10 aa, synthetic construct
  REGION 1..10: note = Description of Artificial Sequence: Synthetic peptide
GFEIVDTYIH

SEQ ID NO: 674 - protein, 10 aa, synthetic construct
  REGION 1..10: note = Description of Artificial Sequence: Synthetic peptide
GFEIVDTYMH

SEQ ID NO: 675 - protein, 10 aa, synthetic construct
  REGION 1..10: note = Description of Artificial Sequence: Synthetic peptide
GFEPGDTFIH

SEQ ID NO: 676 - protein, 10 aa, synthetic construct
  REGION 1..10: note = Description of Artificial Sequence: Synthetic peptide
GFEPGDTFMH

SEQ ID NO: 677 - protein, 10 aa, synthetic construct
  REGION 1..10: note = Description of Artificial Sequence: Synthetic peptide
GFEPGDTYIH

SEQ ID NO: 678 - protein, 10 aa, synthetic construct
  REGION 1..10: note = Description of Artificial Sequence: Synthetic peptide
GFEPGDTYMH

SEQ ID NO: 679 - protein, 10 aa, synthetic construct
  REGION 1..10: note = Description of Artificial Sequence: Synthetic peptide
GFEPQDTFIH

SEQ ID NO: 680 - protein, 10 aa, synthetic construct
  REGION 1..10: note = Description of Artificial Sequence: Synthetic peptide
GFEPQDTFMH

SEQ ID NO: 681 - protein, 10 aa, synthetic construct
  REGION 1..10: note = Description of Artificial Sequence: Synthetic peptide
GFEPQDTYIH

SEQ ID NO: 682 - protein, 10 aa, synthetic construct
  REGION 1..10: note = Description of Artificial Sequence: Synthetic peptide
GFEPQDTYMH

SEQ ID NO: 683 - protein, 10 aa, synthetic construct
  REGION 1..10: note = Description of Artificial Sequence: Synthetic peptide
GFEPSDTFIH

SEQ ID NO: 684 - protein, 10 aa, synthetic construct
  REGION 1..10: note = Description of Artificial Sequence: Synthetic peptide
GFEPSDTFMH

SEQ ID NO: 685 - protein, 10 aa, synthetic construct
  REGION 1..10: note = Description of Artificial Sequence: Synthetic peptide
GFEPSDTYIH

SEQ ID NO: 686 - protein, 10 aa, synthetic construct
  REGION 1..10: note = Description of Artificial Sequence: Synthetic peptide
GFEPSDTYMH

SEQ ID NO: 687 - protein, 10 aa, synthetic construct
  REGION 1..10: note = Description of Artificial Sequence: Synthetic peptide
GFEPVDTFIH

SEQ ID NO: 688 - protein, 10 aa, synthetic construct
  REGION 1..10: note = Description of Artificial Sequence: Synthetic peptide
GFEPVDTFMH

SEQ ID NO: 689 - protein, 10 aa, synthetic construct
  REGION 1..10: note = Description of Artificial Sequence: Synthetic peptide
GFEPVDTYIH

SEQ ID NO: 690 - protein, 10 aa, synthetic construct
  REGION 1..10: note = Description of Artificial Sequence: Synthetic peptide
GFEPVDTYMH

SEQ ID NO: 691 - protein, 10 aa, synthetic construct
  REGION 1..10: note = Description of Artificial Sequence: Synthetic peptide
GFEVGDTFIH

SEQ ID NO: 692 - protein, 10 aa, synthetic construct
  REGION 1..10: note = Description of Artificial Sequence: Synthetic peptide
GFEVGDTFMH

SEQ ID NO: 693 - protein, 10 aa, synthetic construct
  REGION 1..10: note = Description of Artificial Sequence: Synthetic peptide
GFEVGDTYIH

SEQ ID NO: 694 - protein, 10 aa, synthetic construct
  REGION 1..10: note = Description of Artificial Sequence: Synthetic peptide
GFEVGDTYMH

SEQ ID NO: 695 - protein, 10 aa, synthetic construct
  REGION 1..10: note = Description of Artificial Sequence: Synthetic peptide
GFEVQDTFIH

SEQ ID NO: 696 - protein, 10 aa, synthetic construct
  REGION 1..10: note = Description of Artificial Sequence: Synthetic peptide
GFEVQDTFMH

SEQ ID NO: 697 - protein, 10 aa, synthetic construct
  REGION 1..10: note = Description of Artificial Sequence: Synthetic peptide
GFEVQDTYIH

SEQ ID NO: 698 - protein, 10 aa, synthetic construct
  REGION 1..10: note = Description of Artificial Sequence: Synthetic peptide
GFEVQDTYMH

SEQ ID NO: 699 - protein, 10 aa, synthetic construct
  REGION 1..10: note = Description of Artificial Sequence: Synthetic peptide
GFEVSDTFIH

SEQ ID NO: 700 - protein, 10 aa, synthetic construct
  REGION 1..10: note = Description of Artificial Sequence: Synthetic peptide
GFEVSDTFMH

SEQ ID NO: 701 - protein, 10 aa, synthetic construct
  REGION 1..10: note = Description of Artificial Sequence: Synthetic peptide
GFEVSDTYIH

SEQ ID NO: 702 - protein, 10 aa, synthetic construct
  REGION 1..10: note = Description of Artificial Sequence: Synthetic peptide
GFEVSDTYMH

SEQ ID NO: 703 - protein, 10 aa, synthetic construct
  REGION 1..10: note = Description of Artificial Sequence: Synthetic peptide
GFEVVDTFIH

SEQ ID NO: 704 - protein, 10 aa, synthetic construct
  REGION 1..10: note = Description of Artificial Sequence: Synthetic peptide
GFEVVDTFMH

SEQ ID NO: 705 - protein, 10 aa, synthetic construct
  REGION 1..10: note = Description of Artificial Sequence: Synthetic peptide
GFEVVDTYIH

SEQ ID NO: 706 - protein, 10 aa, synthetic construct
  REGION 1..10: note = Description of Artificial Sequence: Synthetic peptide
GFEVVDTYMH

SEQ ID NO: 707 - protein, 10 aa, synthetic construct
  REGION 1..10: note = Description of Artificial Sequence: Synthetic peptide
  MOD_RES 3: note = D or E
  MOD_RES 4: note = I, L, P, or V
  MOD_RES 5: note = G, Q, S, or V
  MOD_RES 7: note = A, S, or T
  MOD_RES 8: note = F or Y
  MOD_RES 9: note = I, L, or M
GFXXXDXXXH

SEQ ID NO: 708 - protein, 10 aa, synthetic construct
  REGION 1..10: note = Description of Artificial Sequence: Synthetic peptide
  MOD_RES 3: note = D or E
  MOD_RES 4: note = I, P, or V
  MOD_RES 5: note = G, Q, S, or V
  MOD_RES 8: note = F or Y
  MOD_RES 9: note = I or M
GFXXXDTXXH

SEQ ID NO: 709 - protein, 8 aa, synthetic construct
  REGION 1..8: note = Description of Artificial Sequence: Synthetic peptide
GFTFSSYW

SEQ ID NO: 710 - protein, 8 aa, synthetic construct
  REGION 1..8: note = Description of Artificial Sequence: Synthetic peptide
GGSFTGFY

SEQ ID NO: 711 - protein, 10 aa, synthetic construct
  REGION 1..10: note = Description of Artificial Sequence: Synthetic peptide
  MOD_RES 3: note = P, S, D, Q, or N
  MOD_RES 5: note = T or R
  MOD_RES 6: note = N, T, Y, or H
GYXFXXYGIS

SEQ ID NO: 712 - protein, 10 aa, synthetic construct
  REGION 1..10: note = Description of Artificial Sequence: Synthetic peptide
GYDFTYYGIS

SEQ ID NO: 713 - protein, 7 aa, synthetic construct
  REGION 1..7: note = Description of Artificial Sequence: Synthetic peptide
SRSYYWG

SEQ ID NO: 714 - protein, 7 aa, synthetic construct
  REGION 1..7: note = Description of Artificial Sequence: Synthetic peptide
TSNMGVV

SEQ ID NO: 715 - protein, 5 aa, synthetic construct
  REGION 1..5: note = Description of Artificial Sequence: Synthetic peptide
LYGMN

SEQ ID NO: 716 - protein, 5 aa, synthetic construct
  REGION 1..5: note = Description of Artificial Sequence: Synthetic peptide
NYGMN

SEQ ID NO: 717 - protein, 10 aa, synthetic construct
  REGION 1..10: note = Description of Artificial Sequence: Synthetic peptide
GYTFTSSWMH

SEQ ID NO: 718 - protein, 10 aa, synthetic construct
  REGION 1..10: note = Description of Artificial Sequence: Synthetic peptide
GYTFTSYDIN

SEQ ID NO: 719 - protein, 5 aa, synthetic construct
  REGION 1..5: note = Description of Artificial Sequence: Synthetic peptide
SYFWS

SEQ ID NO: 720 - protein, 5 aa, synthetic construct
  REGION 1..5: note = Description of Artificial Sequence: Synthetic peptide
GYYWN

SEQ ID NO: 721 - protein, 8 aa, synthetic construct
  REGION 1..8: note = Description of Artificial Sequence: Synthetic peptide
GFTFSTYG

SEQ ID NO: 722 - protein, 5 aa, synthetic construct
  REGION 1..5: note = Description of Artificial Sequence: Synthetic peptide
TYGMS

SEQ ID NO: 723 - protein, 17 aa, synthetic construct
  REGION 1..17: note = Description of Artificial Sequence: Synthetic peptide
WIFPGDGRTDYNEKFKG

SEQ ID NO: 724 - protein, 10 aa, synthetic construct
  REGION 1..10: note = Description of Artificial Sequence: Synthetic peptide
RLDPASGHTK

SEQ ID NO: 725 - protein, 10 aa, synthetic construct
  REGION 1..10: note = Description of Artificial Sequence: Synthetic peptide
RIEPASGHTK

SEQ ID NO: 726 - protein, 10 aa, synthetic construct
  REGION 1..10: note = Description of Artificial Sequence: Synthetic peptide
RIDPESGHTK

SEQ ID NO: 727 - protein, 10 aa, synthetic construct
  REGION 1..10: note = Description of Artificial Sequence: Synthetic peptide
RIDPASGHTK

SEQ ID NO: 728 - protein, 10 aa, synthetic construct
  REGION 1..10: note = Description of Artificial Sequence: Synthetic peptide
RIDPAGGHTK

SEQ ID NO: 729 - protein, 10 aa, synthetic construct
  REGION 1..10: note = Description of Artificial Sequence: Synthetic peptide
RIDPASAHTK

SEQ ID NO: 730 - protein, 10 aa, synthetic construct
  REGION 1..10: note = Description of Artificial Sequence: Synthetic peptide
RIDPASGHIK

SEQ ID NO: 731 - protein, 10 aa, synthetic construct
  REGION 1..10: note = Description of Artificial Sequence: Synthetic peptide
RIDPASGHLK

SEQ ID NO: 732 - protein, 10 aa, synthetic construct
  REGION 1..10: note = Description of Artificial Sequence: Synthetic peptide
RIDPASGHVK

SEQ ID NO: 733 - protein, 7 aa, synthetic construct
  REGION 1..7: note = Description of Artificial Sequence: Synthetic peptide
YDPKFQV

SEQ ID NO: 734 - protein, 7 aa, synthetic construct
  REGION 1..7: note = Description of Artificial Sequence: Synthetic peptide
IDPKFQV

SEQ ID NO: 735 - protein, 7 aa, synthetic construct
  REGION 1..7: note = Description of Artificial Sequence: Synthetic peptide
LDPKFQV

SEQ ID NO: 736 - protein, 7 aa, synthetic construct
  REGION 1..7: note = Description of Artificial Sequence: Synthetic peptide
MDPKFQV

SEQ ID NO: 737 - protein, 7 aa, synthetic construct
  REGION 1..7: note = Description of Artificial Sequence: Synthetic peptide
SDPKFQV

SEQ ID NO: 738 - protein, 7 aa, synthetic construct
  REGION 1..7: note = Description of Artificial Sequence: Synthetic peptide
TDPKFQV

SEQ ID NO: 739 - protein, 7 aa, synthetic construct
  REGION 1..7: note = Description of Artificial Sequence: Synthetic peptide
VDPKFQV

SEQ ID NO: 740 - protein, 7 aa, synthetic construct
  REGION 1..7: note = Description of Artificial Sequence: Synthetic peptide
YIPKFQV

SEQ ID NO: 741 - protein, 7 aa, synthetic construct
  REGION 1..7: note = Description of Artificial Sequence: Synthetic peptide
YNPKFQV

SEQ ID NO: 742 - protein, 7 aa, synthetic construct
  REGION 1..7: note = Description of Artificial Sequence: Synthetic peptide
YRPKFQV

SEQ ID NO: 743 - protein, 7 aa, synthetic construct
  REGION 1..7: note = Description of Artificial Sequence: Synthetic peptide
YSPKFQV

SEQ ID NO: 744 - protein, 7 aa, synthetic construct
  REGION 1..7: note = Description of Artificial Sequence: Synthetic peptide
YDPKFRV

SEQ ID NO: 745 - protein, 7 aa, synthetic construct
  REGION 1..7: note = Description of Artificial Sequence: Synthetic peptide
YDPKFQA

SEQ ID NO: 746 - protein, 7 aa, synthetic construct
  REGION 1..7: note = Description of Artificial Sequence: Synthetic peptide
YDPKFQD

SEQ ID NO: 747 - protein, 7 aa, synthetic construct
  REGION 1..7: note = Description of Artificial Sequence: Synthetic peptide
YDPKFQE

SEQ ID NO: 748 - protein, 7 aa, synthetic construct
  REGION 1..7: note = Description of Artificial Sequence: Synthetic peptide
YDPKFQG

SEQ ID NO: 749 - protein, 7 aa, synthetic construct
  REGION 1..7: note = Description of Artificial Sequence: Synthetic peptide
YDPKFQH

SEQ ID NO: 750 - protein, 7 aa, synthetic construct
  REGION 1..7: note = Description of Artificial Sequence: Synthetic peptide
YDPKFQK

SEQ ID NO: 751 - protein, 7 aa, synthetic construct
  REGION 1..7: note = Description of Artificial Sequence: Synthetic peptide
YDPKFQL

SEQ ID NO: 752 - protein, 7 aa, synthetic construct
  REGION 1..7: note = Description of Artificial Sequence: Synthetic peptide
YDPKFQM

SEQ ID NO: 753 - protein, 7 aa, synthetic construct
  REGION 1..7: note = Description of Artificial Sequence: Synthetic peptide
YDPKFQN

SEQ ID NO: 754 - protein, 7 aa, synthetic construct
  REGION 1..7: note = Description of Artificial Sequence: Synthetic peptide
YDPKFQP

SEQ ID NO: 755 - protein, 7 aa, synthetic construct
  REGION 1..7: note = Description of Artificial Sequence: Synthetic peptide
YDPKFQR

SEQ ID NO: 756 - protein, 7 aa, synthetic construct
  REGION 1..7: note = Description of Artificial Sequence: Synthetic peptide
YDPKFQS

SEQ ID NO: 757 - protein, 7 aa, synthetic construct
  REGION 1..7: note = Description of Artificial Sequence: Synthetic peptide
YDPKFQT

SEQ ID NO: 758 - protein, 17 aa, synthetic construct
  REGION 1..17: note = Description of Artificial Sequence: Synthetic peptide
RIEPASGHIKYDPKFQG

SEQ ID NO: 759 - protein, 17 aa, synthetic construct
  REGION 1..17: note = Description of Artificial Sequence: Synthetic peptide
RIEPASGHIKYSPKFQG

SEQ ID NO: 760 - protein, 17 aa, synthetic construct
  REGION 1..17: note = Description of Artificial Sequence: Synthetic peptide
RIEPASGHVKYSPKFQV

SEQ ID NO: 761 - protein, 17 aa, synthetic construct
  REGION 1..17: note = Description of Artificial Sequence: Synthetic peptide
RIEPASGHVKYDPKFQT

SEQ ID NO: 762 - protein, 17 aa, synthetic construct
  REGION 1..17: note = Description of Artificial Sequence: Synthetic peptide
RIDPASGHIKYDPKFQK

SEQ ID NO: 763 - protein, 17 aa, synthetic construct
  REGION 1..17: note = Description of Artificial Sequence: Synthetic peptide
RIDPASGHVKIDPKFQV

SEQ ID NO: 764 - protein, 17 aa, synthetic construct
  REGION 1..17: note = Description of Artificial Sequence: Synthetic peptide
RIDPASGHLKYDPKFQV

SEQ ID NO: 765 - protein, 17 aa, synthetic construct
  REGION 1..17: note = Description of Artificial Sequence: Synthetic peptide
RIDPASGHLKYDPKFQR

SEQ ID NO: 766 - protein, 17 aa, synthetic construct
  REGION 1..17: note = Description of Artificial Sequence: Synthetic peptide
RIDPASGHLKYDPKFQN

SEQ ID NO: 767 - protein, 17 aa, synthetic construct
  REGION 1..17: note = Description of Artificial Sequence: Synthetic peptide
RIEPASGHLKYDPKFQE

SEQ ID NO: 768 - protein, 5 aa, synthetic construct
  REGION 1..5: note = Description of Artificial Sequence: Synthetic peptide
PASGH

SEQ ID NO: 769 - protein, 17 aa, synthetic construct
  REGION 1..17: note = Description of Artificial Sequence: Synthetic peptide
RIDPASGHTKYDPKFQV

SEQ ID NO: 770 - protein, 17 aa, synthetic construct
  REGION 1..17: note = Description of Artificial Sequence: Synthetic peptide
RIDPASGHLKYDPKFQG

SEQ ID NO: 771 - protein, 17 aa, synthetic construct
  REGION 1..17: note = Description of Artificial Sequence: Synthetic peptide
RIDPASGHTKYDPKFQG

SEQ ID NO: 772 - protein, 17 aa, synthetic construct
  REGION 1..17: note = Description of Artificial Sequence: Synthetic peptide
RIDPASGHSKYDPKFQV

SEQ ID NO: 773 - protein, 17 aa, synthetic construct
  REGION 1..17: note = Description of Artificial Sequence: Synthetic peptide
RIDPASGHYKYDPKFQV

SEQ ID NO: 774 - protein, 17 aa, synthetic construct
  REGION 1..17: note = Description of Artificial Sequence: Synthetic peptide
  MOD_RES 2: note = I or L
  MOD_RES 3: note = D or E
  MOD_RES 5: note = A or E
  MOD_RES 6: note = G or S
  MOD_RES 7: note = A or G
  MOD_RES 9: note = I, L, T, or V
  MOD_RES 11: note = I, L, M, S, T, V, or Y
  MOD_RES 12: note = D, I, N, R, or S
  MOD_RES 16: note = Q or R
  MOD_RES 17: note = A, D, E, G, H, K, L, M, N, P, R, S, T, or V
RXXPXXXHXKXXPKFXX

SEQ ID NO: 775 - protein, 8 aa, synthetic construct
  REGION 1..8: note = Description of Artificial Sequence: Synthetic peptide
IKEDGSEK

SEQ ID NO: 776 - protein, 7 aa, synthetic construct
  REGION 1..7: note = Description of Artificial Sequence: Synthetic peptide
INHRGNT

SEQ ID NO: 777 - protein, 17 aa, synthetic construct
  REGION 1..17: note = Description of Artificial Sequence: Synthetic peptide
  MOD_RES 4: note = T, P, S, or A
  MOD_RES 8: note = N, G, V, K, or A
  MOD_RES 9: note = T or K
  MOD_RES 10: note = H or N
  MOD_RES 13: note = Q or R
  MOD_RES 14: note = K or M
  MOD_RES 15: note = L or H
WISXYNGXXXYAXXXQG

SEQ ID NO: 778 - protein, 17 aa, synthetic construct
  REGION 1..17: note = Description of Artificial Sequence: Synthetic peptide
WISTYNGNTHYARMLQG

SEQ ID NO: 779 - protein, 16 aa, synthetic construct
  REGION 1..16: note = Description of Artificial Sequence: Synthetic peptide
SIYYNGRTYYNPSLKS

SEQ ID NO: 780 - protein, 16 aa, synthetic construct
  REGION 1..16: note = Description of Artificial Sequence: Synthetic peptide
HILWDDREYSNPALKS

SEQ ID NO: 781 - protein, 17 aa, synthetic construct
  REGION 1..17: note = Description of Artificial Sequence: Synthetic peptide
WINTYTGEPTYADDFKG

SEQ ID NO: 782 - protein, 8 aa, synthetic construct
  REGION 1..8: note = Description of Artificial Sequence: Synthetic peptide
IHPNSGGT

SEQ ID NO: 783 - protein, 10 aa, synthetic construct
  REGION 1..10: note = Description of Artificial Sequence: Synthetic peptide
  MOD_RES 8: note = N or Y
WLNPNSGXTG

SEQ ID NO: 784 - protein, 16 aa, synthetic construct
  REGION 1..16: note = Description of Artificial Sequence: Synthetic peptide
YIYYSGNTKYNPSLKS

SEQ ID NO: 785 - protein, 16 aa, synthetic construct
  REGION 1..16: note = Description of Artificial Sequence: Synthetic peptide
EINHAGNTNYNPSLKS

SEQ ID NO: 786 - protein, 8 aa, synthetic construct
  REGION 1..8: note = Description of Artificial Sequence: Synthetic peptide
ISGTGRTT

SEQ ID NO: 787 - protein, 17 aa, synthetic construct
  REGION 1..17: note = Description of Artificial Sequence: Synthetic peptide
WMNTYSGVTTYADDFKG

SEQ ID NO: 788 - protein, 7 aa, synthetic construct
  REGION 1..7: note = Description of Artificial Sequence: Synthetic peptide
YGPAMDY

SEQ ID NO: 789 - protein, 7 aa, synthetic construct
  REGION 1..7: note = Description of Artificial Sequence: Synthetic peptide
LGGLPDV

SEQ ID NO: 790 - protein, 7 aa, synthetic construct
  REGION 1..7: note = Description of Artificial Sequence: Synthetic peptide
SAGLPDV

SEQ ID NO: 791 - protein, 7 aa, synthetic construct
  REGION 1..7: note = Description of Artificial Sequence: Synthetic peptide
SGGAPDV

SEQ ID NO: 792 - protein, 7 aa, synthetic construct
  REGION 1..7: note = Description of Artificial Sequence: Synthetic peptide
SGGMPDV

SEQ ID NO: 793 - protein, 7 aa, synthetic construct
  REGION 1..7: note = Description of Artificial Sequence: Synthetic peptide
SGGLPEV

SEQ ID NO: 794 - protein, 7 aa, synthetic construct
  REGION 1..7: note = Description of Artificial Sequence: Synthetic peptide
SGGLPDK

SEQ ID NO: 795 - protein, 7 aa, synthetic construct
  REGION 1..7: note = Description of Artificial Sequence: Synthetic peptide
SGGLPDM

SEQ ID NO: 796 - protein, 7 aa, synthetic construct
  REGION 1..7: note = Description of Artificial Sequence: Synthetic peptide
SGGLPDQ

SEQ ID NO: 797 - protein, 7 aa, synthetic construct
  REGION 1..7: note = Description of Artificial Sequence: Synthetic peptide
SGGLPDR

SEQ ID NO: 798 - protein, 7 aa, synthetic construct
  REGION 1..7: note = Description of Artificial Sequence: Synthetic peptide
SGGLPDS

SEQ ID NO: 799 - protein, 7 aa, synthetic construct
  REGION 1..7: note = Description of Artificial Sequence: Synthetic peptide
SGGLPDT

SEQ ID NO: 800 - protein, 7 aa, synthetic construct
  REGION 1..7: note = Description of Artificial Sequence: Synthetic peptide
SGGLPDH

SEQ ID NO: 801 - protein, 7 aa, synthetic construct
  REGION 1..7: note = Description of Artificial Sequence: Synthetic peptide
SGGLPDF

SEQ ID NO: 802 - protein, 7 aa, synthetic construct
  REGION 1..7: note = Description of Artificial Sequence: Synthetic peptide
SGGSPDV

SEQ ID NO: 803 - protein, 9 aa, synthetic construct
  REGION 1..9: note = Description of Artificial Sequence: Synthetic peptide
ARSGGLPDM

SEQ ID NO: 804 - protein, 9 aa, synthetic construct
  REGION 1..9: note = Description of Artificial Sequence: Synthetic peptide
ARSGGLPDK

SEQ ID NO: 805 - protein, 6 aa, synthetic construct
  REGION 1..6: note = Description of Artificial Sequence: Synthetic peptide
SGGLPD

SEQ ID NO: 806 - protein, 9 aa, synthetic construct
  REGION 1..9: note = Description of Artificial Sequence: Synthetic peptide
ARSGGLPDF

SEQ ID NO: 807 - protein, 9 aa, synthetic construct
  REGION 1..9: note = Description of Artificial Sequence: Synthetic peptide
ARSGGLPDL

SEQ ID NO: 808 - protein, 7 aa, synthetic construct
  REGION 1..7: note = Description of Artificial Sequence: Synthetic peptide
SGGLPDE

SEQ ID NO: 809 - protein, 7 aa, synthetic construct
  REGION 1..7: note = Description of Artificial Sequence: Synthetic peptide
SGGLPDI

SEQ ID NO: 810 - protein, 7 aa, synthetic construct
  REGION 1..7: note = Description of Artificial Sequence: Synthetic peptide
SGGLPDK

SEQ ID NO: 811 - protein, 7 aa, synthetic construct
  REGION 1..7: note = Description of Artificial Sequence: Synthetic peptide
SGGLPDL

SEQ ID NO: 812 - protein, 7 aa, synthetic construct
  REGION 1..7: note = Description of Artificial Sequence: Synthetic peptide
SGGLPDM

SEQ ID NO: 813 - protein, 7 aa, synthetic construct
  REGION 1..7: note = Description of Artificial Sequence: Synthetic peptide
SGGLPDQ

SEQ ID NO: 814 - protein, 7 aa, synthetic construct
  REGION 1..7: note = Description of Artificial Sequence: Synthetic peptide
SGGLPDT

SEQ ID NO: 815 - protein, 7 aa, synthetic construct
  REGION 1..7: note = Description of Artificial Sequence: Synthetic peptide
SGGLPDW

SEQ ID NO: 816 - protein, 7 aa, synthetic construct
  REGION 1..7: note = Description of Artificial Sequence: Synthetic peptide
SGGLPDY

SEQ ID NO: 817 - protein, 7 aa, synthetic construct
  REGION 1..7: note = Description of Artificial Sequence: Synthetic peptide
SGGMPDE

SEQ ID NO: 818 - protein, 7 aa, synthetic construct
  REGION 1..7: note = Description of Artificial Sequence: Synthetic peptide
SGGMPDI

SEQ ID NO: 819 - protein, 7 aa, synthetic construct
  REGION 1..7: note = Description of Artificial Sequence: Synthetic peptide
SGGMPDK

SEQ ID NO: 820 - protein, 7 aa, synthetic construct
  REGION 1..7: note = Description of Artificial Sequence: Synthetic peptide
SGGMPDL

SEQ ID NO: 821 - protein, 7 aa, synthetic construct
  REGION 1..7: note = Description of Artificial Sequence: Synthetic peptide
SGGMPDM

SEQ ID NO: 822 - protein, 7 aa, synthetic construct
  REGION 1..7: note = Description of Artificial Sequence: Synthetic peptide
SGGMPDQ

SEQ ID NO: 823 - protein, 7 aa, synthetic construct
  REGION 1..7: note = Description of Artificial Sequence: Synthetic peptide
SGGMPDT

SEQ ID NO: 824 - protein, 7 aa, synthetic construct
  REGION 1..7: note = Description of Artificial Sequence: Synthetic peptide
SGGMPDV

SEQ ID NO: 825 - protein, 7 aa, synthetic construct
  REGION 1..7: note = Description of Artificial Sequence: Synthetic peptide
SGGMPDW

SEQ ID NO: 826 - protein, 7 aa, synthetic construct
  REGION 1..7: note = Description of Artificial Sequence: Synthetic peptide
SGGMPDY

SEQ ID NO: 827 - skipped

SEQ ID NO: 828 - protein, 7 aa, synthetic construct
  REGION 1..7: note = Description of Artificial Sequence: Synthetic peptide
  MOD_RES 4: note = L, or M
  MOD_RES 7: note = E, I, K, L, M, Q, T, V, W, or Y
SGGXPDX

SEQ ID NO: 829 - protein, 15 aa, synthetic construct
  REGION 1..15: note = Description of Artificial Sequence: Synthetic peptide
AREDYDSYYKYGMDV

SEQ ID NO: 830 - protein, 13 aa, synthetic construct
  REGION 1..13: note = Description of Artificial Sequence: Synthetic peptide
ASPFYDFWSGSDY

SEQ ID NO: 831 - protein, 15 aa, synthetic construct
  REGION 1..15: note = Description of Artificial Sequence: Synthetic peptide
  MOD_RES 8: note = S or A
  MOD_RES 9: note = Y or P
  MOD_RES 15: note = V, A, or G
ENYYGSGXXRGGMDX

SEQ ID NO: 832 - protein, 15 aa, synthetic construct
  REGION 1..15: note = Description of Artificial Sequence: Synthetic peptide
ENYYGSGAYRGGMDV

SEQ ID NO: 833 - protein, 11 aa, synthetic construct
  REGION 1..11: note = Description of Artificial Sequence: Synthetic peptide
EDYGDYGAFDI

SEQ ID NO: 834 - protein, 14 aa, synthetic construct
  REGION 1..14: note = Description of Artificial Sequence: Synthetic peptide
MSRNYYGSSYVMDY

SEQ ID NO: 835 - protein, 10 aa, synthetic construct
  REGION 1..10: note = Description of Artificial Sequence: Synthetic peptide
DTAMDYAMAY

SEQ ID NO: 836 - protein, 13 aa, synthetic construct
  REGION 1..13: note = Description of Artificial Sequence: Synthetic peptide
DYGKYGDYYAMDY

SEQ ID NO: 837 - protein, 14 aa, synthetic construct
  REGION 1..14: note = Description of Artificial Sequence: Synthetic peptide
ARGDYYGYVSWFAY

SEQ ID NO: 838 - protein, 10 aa, synthetic construct
  REGION 1..10: note = Description of Artificial Sequence: Synthetic peptide
EVPETAAFEY

SEQ ID NO: 839 - protein, 10 aa, synthetic construct
  REGION 1..10: note = Description of Artificial Sequence: Synthetic peptide
ETGSYYGFDY

SEQ ID NO: 840 - protein, 12 aa, synthetic construct
  REGION 1..12: note = Description of Artificial Sequence: Synthetic peptide
GYCRSTTCYFDY

SEQ ID NO: 841 - protein, 14 aa, synthetic construct
  REGION 1..14: note = Description of Artificial Sequence: Synthetic peptide
TKERGDYYYGVFDY

SEQ ID NO: 842 - protein, 13 aa, synthetic construct
  REGION 1..13: note = Description of Artificial Sequence: Synthetic peptide
EGYVFDDYYATDY

SEQ ID NO: 843 - protein, 16 aa, synthetic construct
  REGION 1..16: note = Description of Artificial Sequence: Synthetic peptide
RSSQTIVHSNGDTYLD

SEQ ID NO: 844 - protein, 10 aa, synthetic construct
  REGION 1..10: note = Description of Artificial Sequence: Synthetic peptide
GASSSVSYMY

SEQ ID NO: 845 - protein, 10 aa, synthetic construct
  REGION 1..10: note = Description of Artificial Sequence: Synthetic peptide
WASSSVSYMY

SEQ ID NO: 846 - protein, 10 aa, synthetic construct
  REGION 1..10: note = Description of Artificial Sequence: Synthetic peptide
RASSSVIYMY

SEQ ID NO: 847 - protein, 10 aa, synthetic construct
  REGION 1..10: note = Description of Artificial Sequence: Synthetic peptide
RASSSVSFMY

SEQ ID NO: 848 - protein, 10 aa, synthetic construct
  REGION 1..10: note = Description of Artificial Sequence: Synthetic peptide
RASSSVSYLY

SEQ ID NO: 849 - protein, 10 aa, synthetic construct
  REGION 1..10: note = Description of Artificial Sequence: Synthetic peptide
RASSSVSYMR

SEQ ID NO: 850 - protein, 10 aa, synthetic construct
  REGION 1..10: note = Description of Artificial Sequence: Synthetic peptide
GASSSVSYMY

SEQ ID NO: 851 - protein, 9 aa, synthetic construct
  REGION 1..9: note = Description of Artificial Sequence: Synthetic peptide
ASSSVSYMY

SEQ ID NO: 852 - protein, 10 aa, synthetic construct
  REGION 1..10: note = Description of Artificial Sequence: Synthetic peptide
  MOD_RES 1: note = G, R, or W
  MOD_RES 7: note = I or S
  MOD_RES 8: note = F or Y
  MOD_RES 9: note = L or M
  MOD_RES 10: note = R or Y
XASSSVXXXX

SEQ ID NO: 853 - protein, 12 aa, synthetic construct
  REGION 1..12: note = Description of Artificial Sequence: Synthetic peptide
QSILYSSNNKNY

SEQ ID NO: 854 - protein, 11 aa, synthetic construct
  REGION 1..11: note = Description of Artificial Sequence: Synthetic peptide
QSLVHSDGNTY

SEQ ID NO: 855 - protein, 11 aa, synthetic construct
  REGION 1..11: note = Description of Artificial Sequence: Synthetic peptide
RASQSVSSYLA

SEQ ID NO: 856 - protein, 11 aa, synthetic construct
  REGION 1..11: note = Description of Artificial Sequence: Synthetic peptide
RASQGISSALA

SEQ ID NO: 857 - protein, 10 aa, synthetic construct
  REGION 1..10: note = Description of Artificial Sequence: Synthetic peptide
SASSSVNYMH

SEQ ID NO: 858 - protein, 16 aa, synthetic construct
  REGION 1..16: note = Description of Artificial Sequence: Synthetic peptide
KSSQNIVHSDGNTYLE

SEQ ID NO: 859 - protein, 16 aa, synthetic construct
  REGION 1..16: note = Description of Artificial Sequence: Synthetic peptide
RSSQSIVHSNGNTYLD

SEQ ID NO: 860 - protein, 6 aa, synthetic construct
  REGION 1..6: note = Description of Artificial Sequence: Synthetic peptide
QNINVL

SEQ ID NO: 861 - protein, 14 aa, synthetic construct
  REGION 1..14: note = Description of Artificial Sequence: Synthetic peptide
  MOD_RES 10: note = G or A
  MOD_RES 11: note = L, S, or Q
  MOD_RES 14: note = H or L
TSSSSDIGAXXGVX

SEQ ID NO: 862 - protein, 11 aa, synthetic construct
  REGION 1..11: note = Description of Artificial Sequence: Synthetic peptide
RASQSINNYLN

SEQ ID NO: 863 - protein, 12 aa, synthetic construct
  REGION 1..12: note = Description of Artificial Sequence: Synthetic peptide
RASQSVRSSYLA

SEQ ID NO: 864 - protein, 6 aa, synthetic construct
  REGION 1..6: note = Description of Artificial Sequence: Synthetic peptide
QTISSW

SEQ ID NO: 865 - protein, 16 aa, synthetic construct
  REGION 1..16: note = Description of Artificial Sequence: Synthetic peptide
RSSQNIVHSDGNTYLE

SEQ ID NO: 866 - protein, 7 aa, synthetic construct
  REGION 1..7: note = Description of Artificial Sequence: Synthetic peptide
KVSNRFS

SEQ ID NO: 867 - protein, 7 aa, synthetic construct
  REGION 1..7: note = Description of Artificial Sequence: Synthetic peptide
AKSNLAS

SEQ ID NO: 868 - protein, 7 aa, synthetic construct
  REGION 1..7: note = Description of Artificial Sequence: Synthetic peptide
ATPNLAS

SEQ ID NO: 869 - protein, 7 aa, synthetic construct
  REGION 1..7: note = Description of Artificial Sequence: Synthetic peptide
ATENLAS

SEQ ID NO: 870 - protein, 7 aa, synthetic construct
  REGION 1..7: note = Description of Artificial Sequence: Synthetic peptide
ATSLLAS

SEQ ID NO: 871 - protein, 7 aa, synthetic construct
  REGION 1..7: note = Description of Artificial Sequence: Synthetic peptide
ATSPLAS

SEQ ID NO: 872 - protein, 7 aa, synthetic construct
  REGION 1..7: note = Description of Artificial Sequence: Synthetic peptide
ATSNLTS

SEQ ID NO: 873-875 - skipped (3 entries)

SEQ ID NO: 876 - protein, 7 aa, synthetic construct
  REGION 1..7: note = Description of Artificial Sequence: Synthetic peptide
DASNRAT

SEQ ID NO: 877 - protein, 7 aa, synthetic construct
  REGION 1..7: note = Description of Artificial Sequence: Synthetic peptide
DASSLES

SEQ ID NO: 878 - protein, 7 aa, synthetic construct
  REGION 1..7: note = Description of Artificial Sequence: Synthetic peptide
STSNLAS

SEQ ID NO: 879 - protein, 7 aa, synthetic construct
  REGION 1..7: note = Description of Artificial Sequence: Synthetic peptide
KVSNRFS

SEQ ID NO: 880 - skipped

SEQ ID NO: 881 - protein, 7 aa, synthetic construct
  REGION 1..7: note = Description of Artificial Sequence: Synthetic peptide
GYYNRPS

SEQ ID NO: 882 - protein, 7 aa, synthetic construct
  REGION 1..7: note = Description of Artificial Sequence: Synthetic peptide
AASSLQS

SEQ ID NO: 883 - protein, 7 aa, synthetic construct
  REGION 1..7: note = Description of Artificial Sequence: Synthetic peptide
GASSRAT

SEQ ID NO: 884 - skipped

SEQ ID NO: 885 - protein, 7 aa, synthetic construct
  REGION 1..7: note = Description of Artificial Sequence: Synthetic peptide
KVSNRFS

SEQ ID NO: 886 - protein, 9 aa, synthetic construct
  REGION 1..9: note = Description of Artificial Sequence: Synthetic peptide
FQGSHVPYT

SEQ ID NO: 887 - protein, 9 aa, synthetic construct
  REGION 1..9: note = Description of Artificial Sequence: Synthetic peptide
HQWSGNPRT

SEQ ID NO: 888 - protein, 9 aa, synthetic construct
  REGION 1..9: note = Description of Artificial Sequence: Synthetic peptide
NQWSGNPRT

SEQ ID NO: 889 - protein, 9 aa, synthetic construct
  REGION 1..9: note = Description of Artificial Sequence: Synthetic peptide
SQWSGNPRT

SEQ ID NO: 890 - protein, 9 aa, synthetic construct
  REGION 1..9: note = Description of Artificial Sequence: Synthetic peptide
QQSSGNPRT

SEQ ID NO: 891 - protein, 9 aa, synthetic construct
  REGION 1..9: note = Description of Artificial Sequence: Synthetic peptide
QQWDGNPRT

SEQ ID NO: 892 - protein, 9 aa, synthetic construct
  REGION 1..9: note = Description of Artificial Sequence: Synthetic peptide
QQWHGNPRT

SEQ ID NO: 893 - protein, 9 aa, synthetic construct
  REGION 1..9: note = Description of Artificial Sequence: Synthetic peptide
QQWNGNPRT

SEQ ID NO: 894 - protein, 9 aa, synthetic construct
  REGION 1..9: note = Description of Artificial Sequence: Synthetic peptide
QQWQGNPRT

SEQ ID NO: 895 - protein, 9 aa, synthetic construct
  REGION 1..9: note = Description of Artificial Sequence: Synthetic peptide
QQWVGNPRT

SEQ ID NO: 896 - protein, 9 aa, synthetic construct
  REGION 1..9: note = Description of Artificial Sequence: Synthetic peptide
QQWSANPRT

SEQ ID NO: 897 - protein, 9 aa, synthetic construct
  REGION 1..9: note = Description of Artificial Sequence: Synthetic peptide
QQWSDNPRT

SEQ ID NO: 898 - protein, 9 aa, synthetic construct
  REGION 1..9: note = Description of Artificial Sequence: Synthetic peptide
QQWSQNPRT

SEQ ID NO: 899 - protein, 9 aa, synthetic construct
  REGION 1..9: note = Description of Artificial Sequence: Synthetic peptide
QQWSSNPRT

SEQ ID NO: 900 - protein, 9 aa, synthetic construct
  REGION 1..9: note = Description of Artificial Sequence: Synthetic peptide
QQWSGNPRS

SEQ ID NO: 901 - protein, 9 aa, synthetic construct
  REGION 1..9: note = Description of Artificial Sequence: Synthetic peptide
QQFSGNPRT

SEQ ID NO: 902 - protein, 9 aa, synthetic construct
  REGION 1..9: note = Description of Artificial Sequence: Synthetic peptide
QQHSGNPRT

SEQ ID NO: 903 - protein, 9 aa, synthetic construct
  REGION 1..9: note = Description of Artificial Sequence: Synthetic peptide
QQISGNPRT

SEQ ID NO: 904 - protein, 9 aa, synthetic construct
  REGION 1..9: note = Description of Artificial Sequence: Synthetic peptide
QQPSGNPRT

SEQ ID NO: 905 - protein, 9 aa, synthetic construct
  REGION 1..9: note = Description of Artificial Sequence: Synthetic peptide
QQRSGNPRT

SEQ ID NO: 906 - protein, 9 aa, synthetic construct
  REGION 1..9: note = Description of Artificial Sequence: Synthetic peptide
QQYSGNPRT

SEQ ID NO: 907 - protein, 9 aa, synthetic construct
  REGION 1..9: note = Description of Artificial Sequence: Synthetic peptide
QQWSGHPRT

SEQ ID NO: 908 - protein, 9 aa, synthetic construct
  REGION 1..9: note = Description of Artificial Sequence: Synthetic peptide
QQWSGLPRT

SEQ ID NO: 909 - protein, 9 aa, synthetic construct
  REGION 1..9: note = Description of Artificial Sequence: Synthetic peptide
QQWSGQPRT

SEQ ID NO: 910 - protein, 9 aa, synthetic construct
  REGION 1..9: note = Description of Artificial Sequence: Synthetic peptide
QQWSGSPRT

SEQ ID NO: 911 - protein, 9 aa, synthetic construct
  REGION 1..9: note = Description of Artificial Sequence: Synthetic peptide
QQWSGTPRT

SEQ ID NO: 912 - protein, 9 aa, synthetic construct
  REGION 1..9: note = Description of Artificial Sequence: Synthetic peptide
QQWSGMPRT

SEQ ID NO: 913 - protein, 9 aa, synthetic construct
  REGION 1..9: note = Description of Artificial Sequence: Synthetic peptide
QQWSGFPRT

SEQ ID NO: 914 - protein, 9 aa, synthetic construct
  REGION 1..9: note = Description of Artificial Sequence: Synthetic peptide
QQWSGKPRT

SEQ ID NO: 915 - protein, 9 aa, synthetic construct
  REGION 1..9: note = Description of Artificial Sequence: Synthetic peptide
QQWSGRPRT

SEQ ID NO: 916 - protein, 9 aa, synthetic construct
  REGION 1..9: note = Description of Artificial Sequence: Synthetic peptide
QQWSGDPRT

SEQ ID NO: 917 - protein, 9 aa, synthetic construct
  REGION 1..9: note = Description of Artificial Sequence: Synthetic peptide
QQWAGNPRT

SEQ ID NO: 918 - protein, 9 aa, synthetic construct
  REGION 1..9: note = Description of Artificial Sequence: Synthetic peptide
QQWYGNPRT

SEQ ID NO: 919 - protein, 9 aa, synthetic construct
  REGION 1..9: note = Description of Artificial Sequence: Synthetic peptide
QQWFGNPRT

SEQ ID NO: 920 - protein, 9 aa, synthetic construct
  REGION 1..9: note = Description of Artificial Sequence: Synthetic peptide
QQWQGNPRT

SEQ ID NO: 921 - protein, 5 aa, synthetic construct
  REGION 1..5: note = Description of Artificial Sequence: Synthetic peptide
GNPRT

SEQ ID NO: 922 - protein, 9 aa, synthetic construct
  REGION 1..9: note = Description of Artificial Sequence: Synthetic peptide
SQWSGNPRT

SEQ ID NO: 923 - protein, 9 aa, synthetic construct
  REGION 1..9: note = Description of Artificial Sequence: Synthetic peptide
QQWSGNPRS

SEQ ID NO: 924 - protein, 9 aa, synthetic construct
  REGION 1..9: note = Description of Artificial Sequence: Synthetic peptide
QQWSGTPRT

SEQ ID NO: 925 - protein, 9 aa, synthetic construct
  REGION 1..9: note = Description of Artificial Sequence: Synthetic peptide
QQWSGDPRT

SEQ ID NO: 926 - protein, 9 aa, synthetic construct
  REGION 1..9: note = Description of Artificial Sequence: Synthetic peptide
QQWSGFPRT

SEQ ID NO: 927 - protein, 9 aa, synthetic construct
  REGION 1..9: note = Description of Artificial Sequence: Synthetic peptide
QQWSGKPRT

SEQ ID NO: 928 - protein, 9 aa, synthetic construct
  REGION 1..9: note = Description of Artificial Sequence: Synthetic peptide
QQWSGRPRT

SEQ ID NO: 929 - protein, 9 aa, synthetic construct
  REGION 1..9: note = Description of Artificial Sequence: Synthetic peptide
QQWSGSPRT

SEQ ID NO: 930 - protein, 9 aa, synthetic construct
  REGION 1..9: note = Description of Artificial Sequence: Synthetic peptide
QQWDADPRT

SEQ ID NO: 931 - protein, 9 aa, synthetic construct
  REGION 1..9: note = Description of Artificial Sequence: Synthetic peptide
QQWDAFPRT

SEQ ID NO: 932 - protein, 9 aa, synthetic construct
  REGION 1..9: note = Description of Artificial Sequence: Synthetic peptide
QQWDAKPRT

SEQ ID NO: 933 - protein, 9 aa, synthetic construct
  REGION 1..9: note = Description of Artificial Sequence: Synthetic peptide
QQWDANPRT

SEQ ID NO: 934 - protein, 9 aa, synthetic construct
  REGION 1..9: note = Description of Artificial Sequence: Synthetic peptide
QQWDARPRT

SEQ ID NO: 935 - protein, 9 aa, synthetic construct
  REGION 1..9: note = Description of Artificial Sequence: Synthetic peptide
QQWDASPRT

SEQ ID NO: 936 - protein, 9 aa, synthetic construct
  REGION 1..9: note = Description of Artificial Sequence: Synthetic peptide
QQWDATPRT

SEQ ID NO: 937 - protein, 9 aa, synthetic construct
  REGION 1..9: note = Description of Artificial Sequence: Synthetic peptide
QQWDGDPRT

SEQ ID NO: 938 - protein, 9 aa, synthetic construct
  REGION 1..9: note = Description of Artificial Sequence: Synthetic peptide
QQWDGFPRT

SEQ ID NO: 939 - protein, 9 aa, synthetic construct
  REGION 1..9: note = Description of Artificial Sequence: Synthetic peptide
QQWDGKPRT

SEQ ID NO: 940 - protein, 9 aa, synthetic construct
  REGION 1..9: note = Description of Artificial Sequence: Synthetic peptide
QQWDGNPRT

SEQ ID NO: 941 - protein, 9 aa, synthetic construct
  REGION 1..9: note = Description of Artificial Sequence: Synthetic peptide
QQWDGRPRT

SEQ ID NO: 942 - protein, 9 aa, synthetic construct
  REGION 1..9: note = Description of Artificial Sequence: Synthetic peptide
QQWDGSPRT

SEQ ID NO: 943 - protein, 9 aa, synthetic construct
  REGION 1..9: note = Description of Artificial Sequence: Synthetic peptide
QQWDGTPRT

SEQ ID NO: 944 - protein, 9 aa, synthetic construct
  REGION 1..9: note = Description of Artificial Sequence: Synthetic peptide
QQWEADPRT

SEQ ID NO: 945 - protein, 9 aa, synthetic construct
  REGION 1..9: note = Description of Artificial Sequence: Synthetic peptide
QQWEAFPRT

SEQ ID NO: 946 - protein, 9 aa, synthetic construct
  REGION 1..9: note = Description of Artificial Sequence: Synthetic peptide
QQWEAKPRT

SEQ ID NO: 947 - protein, 9 aa, synthetic construct
  REGION 1..9: note = Description of Artificial Sequence: Synthetic peptide
QQWEANPRT

SEQ ID NO: 948 - protein, 9 aa, synthetic construct
  REGION 1..9: note = Description of Artificial Sequence: Synthetic peptide
QQWEARPRT

SEQ ID NO: 949 - protein, 9 aa, synthetic construct
  REGION 1..9: note = Description of Artificial Sequence: Synthetic peptide
QQWEASPRT

SEQ ID NO: 950 - protein, 9 aa, synthetic construct
  REGION 1..9: note = Description of Artificial Sequence: Synthetic peptide
QQWEATPRT

SEQ ID NO: 951 - protein, 9 aa, synthetic construct
  REGION 1..9: note = Description of Artificial Sequence: Synthetic peptide
QQWEGDPRT

SEQ ID NO: 952 - protein, 9 aa, synthetic construct
  REGION 1..9: note = Description of Artificial Sequence: Synthetic peptide
QQWEGFPRT

SEQ ID NO: 953 - protein, 9 aa, synthetic construct
  REGION 1..9: note = Description of Artificial Sequence: Synthetic peptide
QQWEGKPRT

SEQ ID NO: 954 - protein, 9 aa, synthetic construct
  REGION 1..9: note = Description of Artificial Sequence: Synthetic peptide
QQWEGRPRT

SEQ ID NO: 955 - protein, 9 aa, synthetic construct
  REGION 1..9: note = Description of Artificial Sequence: Synthetic peptide
QQWEGSPRT

SEQ ID NO: 956 - protein, 9 aa, synthetic construct
  REGION 1..9: note = Description of Artificial Sequence: Synthetic peptide
QQWEGTPRT

SEQ ID NO: 957 - protein, 9 aa, synthetic construct
  REGION 1..9: note = Description of Artificial Sequence: Synthetic peptide
QQWHADPRT

SEQ ID NO: 958 - protein, 9 aa, synthetic construct
  REGION 1..9: note = Description of Artificial Sequence: Synthetic peptide
QQWHAFPRT

SEQ ID NO: 959 - protein, 9 aa, synthetic construct
  REGION 1..9: note = Description of Artificial Sequence: Synthetic peptide
QQWHAKPRT

SEQ ID NO: 960 - protein, 9 aa, synthetic construct
  REGION 1..9: note = Description of Artificial Sequence: Synthetic peptide
QQWHANPRT

SEQ ID NO: 961 - protein, 9 aa, synthetic construct
  REGION 1..9: note = Description of Artificial Sequence: Synthetic peptide
QQWHARPRT

SEQ ID NO: 962 - protein, 9 aa, synthetic construct
  REGION 1..9: note = Description of Artificial Sequence: Synthetic peptide
QQWHASPRT

SEQ ID NO: 963 - protein, 9 aa, synthetic construct
  REGION 1..9: note = Description of Artificial Sequence: Synthetic peptide
QQWHATPRT

SEQ ID NO: 964 - protein, 9 aa, synthetic construct
  REGION 1..9: note = Description of Artificial Sequence: Synthetic peptide
QQWHGDPRT

SEQ ID NO: 965 - protein, 9 aa, synthetic construct
  REGION 1..9: note = Description of Artificial Sequence: Synthetic peptide
QQWHGFPRT

SEQ ID NO: 966 - protein, 9 aa, synthetic construct
  REGION 1..9: note = Description of Artificial Sequence: Synthetic peptide
QQWHGKPRT

SEQ ID NO: 967 - protein, 9 aa, synthetic construct
  REGION 1..9: note = Description of Artificial Sequence: Synthetic peptide
QQWHGNPRT

SEQ ID NO: 968 - protein, 9 aa, synthetic construct
  REGION 1..9: note = Description of Artificial Sequence: Synthetic peptide
QQWHGRPRT

SEQ ID NO: 969 - protein, 9 aa, synthetic construct
  REGION 1..9: note = Description of Artificial Sequence: Synthetic peptide
QQWHGSPRT

SEQ ID NO: 970 - protein, 9 aa, synthetic construct
  REGION 1..9: note = Description of Artificial Sequence: Synthetic peptide
QQWHGTPRT

SEQ ID NO: 971 - protein, 9 aa, synthetic construct
  REGION 1..9: note = Description of Artificial Sequence: Synthetic peptide
QQWNADPRT

SEQ ID NO: 972 - protein, 9 aa, synthetic construct
  REGION 1..9: note = Description of Artificial Sequence: Synthetic peptide
QQWNAFPRT

SEQ ID NO: 973 - protein, 9 aa, synthetic construct
  REGION 1..9: note = Description of Artificial Sequence: Synthetic peptide
QQWNAKPRT

SEQ ID NO: 974 - protein, 9 aa, synthetic construct
  REGION 1..9: note = Description of Artificial Sequence: Synthetic peptide
QQWNANPRT

SEQ ID NO: 975 - protein, 9 aa, synthetic construct
  REGION 1..9: note = Description of Artificial Sequence: Synthetic peptide
QQWNARPRT

SEQ ID NO: 976 - protein, 9 aa, synthetic construct
  REGION 1..9: note = Description of Artificial Sequence: Synthetic peptide
QQWNASPRT

SEQ ID NO: 977 - protein, 9 aa, synthetic construct
  REGION 1..9: note = Description of Artificial Sequence: Synthetic peptide
QQWNATPRT

SEQ ID NO: 978 - protein, 9 aa, synthetic construct
  REGION 1..9: note = Description of Artificial Sequence: Synthetic peptide
QQWNGDPRT

SEQ ID NO: 979 - protein, 9 aa, synthetic construct
  REGION 1..9: note = Description of Artificial Sequence: Synthetic peptide
QQWNGFPRT

SEQ ID NO: 980 - protein, 9 aa, synthetic construct
  REGION 1..9: note = Description of Artificial Sequence: Synthetic peptide
QQWNGKPRT

SEQ ID NO: 981 - protein, 9 aa, synthetic construct
  REGION 1..9: note = Description of Artificial Sequence: Synthetic peptide
QQWNGNPRT

SEQ ID NO: 982 - protein, 9 aa, synthetic construct
  REGION 1..9: note = Description of Artificial Sequence: Synthetic peptide
QQWNGRPRT

SEQ ID NO: 983 - protein, 9 aa, synthetic construct
  REGION 1..9: note = Description of Artificial Sequence: Synthetic peptide
QQWNGSPRT

SEQ ID NO: 984 - protein, 9 aa, synthetic construct
  REGION 1..9: note = Description of Artificial Sequence: Synthetic peptide
QQWNGTPRT

SEQ ID NO: 985 - protein, 9 aa, synthetic construct
  REGION 1..9: note = Description of Artificial Sequence: Synthetic peptide
QQWQADPRT

SEQ ID NO: 986 - protein, 9 aa, synthetic construct
  REGION 1..9: note = Description of Artificial Sequence: Synthetic peptide
QQWQAFPRT

SEQ ID NO: 987 - protein, 9 aa, synthetic construct
  REGION 1..9: note = Description of Artificial Sequence: Synthetic peptide
QQWQAKPRT

SEQ ID NO: 988 - protein, 9 aa, synthetic construct
  REGION 1..9: note = Description of Artificial Sequence: Synthetic peptide
QQWQANPRT

SEQ ID NO: 989 - protein, 9 aa, synthetic construct
  REGION 1..9: note = Description of Artificial Sequence: Synthetic peptide
QQWQARPRT

SEQ ID NO: 990 - protein, 9 aa, synthetic construct
  REGION 1..9: note = Description of Artificial Sequence: Synthetic peptide
QQWQASPRT

SEQ ID NO: 991 - protein, 9 aa, synthetic construct
  REGION 1..9: note = Description of Artificial Sequence: Synthetic peptide
QQWQATPRT

SEQ ID NO: 992 - protein, 9 aa, synthetic construct
  REGION 1..9: note = Description of Artificial Sequence: Synthetic peptide
QQWQGDPRT

SEQ ID NO: 993 - protein, 9 aa, synthetic construct
  REGION 1..9: note = Description of Artificial Sequence: Synthetic peptide
QQWQGFPRT

SEQ ID NO: 994 - protein, 9 aa, synthetic construct
  REGION 1..9: note = Description of Artificial Sequence: Synthetic peptide
QQWQGKPRT

SEQ ID NO: 995 - protein, 9 aa, synthetic construct
  REGION 1..9: note = Description of Artificial Sequence: Synthetic peptide
QQWQGRPRT

SEQ ID NO: 996 - protein, 9 aa, synthetic construct
  REGION 1..9: note = Description of Artificial Sequence: Synthetic peptide
QQWQGSPRT

SEQ ID NO: 997 - protein, 9 aa, synthetic construct
  REGION 1..9: note = Description of Artificial Sequence: Synthetic peptide
QQWQGTPRT

SEQ ID NO: 998 - protein, 9 aa, synthetic construct
  REGION 1..9: note = Description of Artificial Sequence: Synthetic peptide
QQWSADPRT

SEQ ID NO: 999 - protein, 9 aa, synthetic construct
  REGION 1..9: note = Description of Artificial Sequence: Synthetic peptide
QQWSAFPRT

SEQ ID NO: 1000 - protein, 9 aa, synthetic construct
  REGION 1..9: note = Description of Artificial Sequence: Synthetic peptide
QQWSAKPRT

SEQ ID NO: 1001 - protein, 9 aa, synthetic construct
  REGION 1..9: note = Description of Artificial Sequence: Synthetic peptide
QQWSANPRT

SEQ ID NO: 1002 - protein, 9 aa, synthetic construct
  REGION 1..9: note = Description of Artificial Sequence: Synthetic peptide
QQWSARPRT

SEQ ID NO: 1003 - protein, 9 aa, synthetic construct
  REGION 1..9: note = Description of Artificial Sequence: Synthetic peptide
QQWSASPRT

SEQ ID NO: 1004 - protein, 9 aa, synthetic construct
  REGION 1..9: note = Description of Artificial Sequence: Synthetic peptide
QQWSATPRT

SEQ ID NO: 1005 - protein, 9 aa, synthetic construct
  REGION 1..9: note = Description of Artificial Sequence: Synthetic peptide
NQWDAFPRT

SEQ ID NO: 1006 - protein, 9 aa, synthetic construct
  REGION 1..9: note = Description of Artificial Sequence: Synthetic peptide
NQWDAKPRT

SEQ ID NO: 1007 - protein, 9 aa, synthetic construct
  REGION 1..9: note = Description of Artificial Sequence: Synthetic peptide
NQWDANPRT

SEQ ID NO: 1008 - protein, 9 aa, synthetic construct
  REGION 1..9: note = Description of Artificial Sequence: Synthetic peptide
NQWDARPRT

SEQ ID NO: 1009 - protein, 9 aa, synthetic construct
  REGION 1..9: note = Description of Artificial Sequence: Synthetic peptide
NQWDASPRT

SEQ ID NO: 1010 - protein, 9 aa, synthetic construct
  REGION 1..9: note = Description of Artificial Sequence: Synthetic peptide
NQWDATPRT

SEQ ID NO: 1011 - protein, 9 aa, synthetic construct
  REGION 1..9: note = Description of Artificial Sequence: Synthetic peptide
NQWDGDPRT

SEQ ID NO: 1012 - protein, 9 aa, synthetic construct
  REGION 1..9: note = Description of Artificial Sequence: Synthetic peptide
NQWDGFPRT

SEQ ID NO: 1013 - protein, 9 aa, synthetic construct
  REGION 1..9: note = Description of Artificial Sequence: Synthetic peptide
NQWDGKPRT

SEQ ID NO: 1014 - protein, 9 aa, synthetic construct
  REGION 1..9: note = Description of Artificial Sequence: Synthetic peptide
NQWDGNPRT

SEQ ID NO: 1015 - protein, 9 aa, synthetic construct
  REGION 1..9: note = Description of Artificial Sequence: Synthetic peptide
NQWDGRPRT

SEQ ID NO: 1016 - protein, 9 aa, synthetic construct
  REGION 1..9: note = Description of Artificial Sequence: Synthetic peptide
NQWDGSPRT

SEQ ID NO: 1017 - protein, 9 aa, synthetic construct
  REGION 1..9: note = Description of Artificial Sequence: Synthetic peptide
NQWDGTPRT

SEQ ID NO: 1018 - protein, 9 aa, synthetic construct
  REGION 1..9: note = Description of Artificial Sequence: Synthetic peptide
NQWEADPRT

SEQ ID NO: 1019 - protein, 9 aa, synthetic construct
  REGION 1..9: note = Description of Artificial Sequence: Synthetic peptide
NQWEAFPRT

SEQ ID NO: 1020 - protein, 9 aa, synthetic construct
  REGION 1..9: note = Description of Artificial Sequence: Synthetic peptide
NQWEAKPRT

SEQ ID NO: 1021 - protein, 9 aa, synthetic construct
  REGION 1..9: note = Description of Artificial Sequence: Synthetic peptide
NQWEANPRT

SEQ ID NO: 1022 - protein, 9 aa, synthetic construct
  REGION 1..9: note = Description of Artificial Sequence: Synthetic peptide
NQWEARPRT

SEQ ID NO: 1023 - protein, 9 aa, synthetic construct
  REGION 1..9: note = Description of Artificial Sequence: Synthetic peptide
NQWEASPRT

SEQ ID NO: 1024 - protein, 9 aa, synthetic construct
  REGION 1..9: note = Description of Artificial Sequence: Synthetic peptide
NQWEATPRT

SEQ ID NO: 1025 - protein, 9 aa, synthetic construct
  REGION 1..9: note = Description of Artificial Sequence: Synthetic peptide
NQWEGDPRT

SEQ ID NO: 1026 - protein, 9 aa, synthetic construct
  REGION 1..9: note = Description of Artificial Sequence: Synthetic peptide
NQWEGFPRT

SEQ ID NO: 1027 - protein, 9 aa, synthetic construct
  REGION 1..9: note = Description of Artificial Sequence: Synthetic peptide
NQWEGKPRT

SEQ ID NO: 1028 - protein, 9 aa, synthetic construct
  REGION 1..9: note = Description of Artificial Sequence: Synthetic peptide
NQWEGNPRT

SEQ ID NO: 1029 - protein, 9 aa, synthetic construct
  REGION 1..9: note = Description of Artificial Sequence: Synthetic peptide
NQWEGRPRT

SEQ ID NO: 1030 - protein, 9 aa, synthetic construct
  REGION 1..9: note = Description of Artificial Sequence: Synthetic peptide
NQWEGSPRT

SEQ ID NO: 1031 - protein, 9 aa, synthetic construct
  REGION 1..9: note = Description of Artificial Sequence: Synthetic peptide
NQWEGTPRT

SEQ ID NO: 1032 - protein, 9 aa, synthetic construct
  REGION 1..9: note = Description of Artificial Sequence: Synthetic peptide
NQWHADPRT

SEQ ID NO: 1033 - protein, 9 aa, synthetic construct
  REGION 1..9: note = Description of Artificial Sequence: Synthetic peptide
NQWHAFPRT

SEQ ID NO: 1034 - protein, 9 aa, synthetic construct
  REGION 1..9: note = Description of Artificial Sequence: Synthetic peptide
NQWHAKPRT

SEQ ID NO: 1035 - protein, 9 aa, synthetic construct
  REGION 1..9: note = Description of Artificial Sequence: Synthetic peptide
NQWHANPRT

SEQ ID NO: 1036 - protein, 9 aa, synthetic construct
  REGION 1..9: note = Description of Artificial Sequence: Synthetic peptide
NQWHARPRT

SEQ ID NO: 1037 - protein, 9 aa, synthetic construct
  REGION 1..9: note = Description of Artificial Sequence: Synthetic peptide
NQWHASPRT

SEQ ID NO: 1038 - protein, 9 aa, synthetic construct
  REGION 1..9: note = Description of Artificial Sequence: Synthetic peptide
NQWHATPRT

SEQ ID NO: 1039 - protein, 9 aa, synthetic construct
  REGION 1..9: note = Description of Artificial Sequence: Synthetic peptide
NQWHGDPRT

SEQ ID NO: 1040 - protein, 9 aa, synthetic construct
  REGION 1..9: note = Description of Artificial Sequence: Synthetic peptide
NQWHGFPRT

SEQ ID NO: 1041 - protein, 9 aa, synthetic construct
  REGION 1..9: note = Description of Artificial Sequence: Synthetic peptide
NQWHGKPRT

SEQ ID NO: 1042 - protein, 9 aa, synthetic construct
  REGION 1..9: note = Description of Artificial Sequence: Synthetic peptide
NQWHGNPRT

SEQ ID NO: 1043 - protein, 9 aa, synthetic construct
  REGION 1..9: note = Description of Artificial Sequence: Synthetic peptide
NQWHGRPRT

SEQ ID NO: 1044 - protein, 9 aa, synthetic construct
  REGION 1..9: note = Description of Artificial Sequence: Synthetic peptide
NQWHGSPRT

SEQ ID NO: 1045 - protein, 9 aa, synthetic construct
  REGION 1..9: note = Description of Artificial Sequence: Synthetic peptide
NQWHGTPRT

SEQ ID NO: 1046 - protein, 9 aa, synthetic construct
  REGION 1..9: note = Description of Artificial Sequence: Synthetic peptide
NQWNADPRT

SEQ ID NO: 1047 - protein, 9 aa, synthetic construct
  REGION 1..9: note = Description of Artificial Sequence: Synthetic peptide
NQWNAFPRT

SEQ ID NO: 1048 - protein, 9 aa, synthetic construct
  REGION 1..9: note = Description of Artificial Sequence: Synthetic peptide
NQWNAKPRT

SEQ ID NO: 1049 - protein, 9 aa, synthetic construct
  REGION 1..9: note = Description of Artificial Sequence: Synthetic peptide
NQWNANPRT

SEQ ID NO: 1050 - protein, 9 aa, synthetic construct
  REGION 1..9: note = Description of Artificial Sequence: Synthetic peptide
NQWNARPRT

SEQ ID NO: 1051 - protein, 9 aa, synthetic construct
  REGION 1..9: note = Description of Artificial Sequence: Synthetic peptide
NQWNASPRT

SEQ ID NO: 1052 - protein, 9 aa, synthetic construct
  REGION 1..9: note = Description of Artificial Sequence: Synthetic peptide
NQWNATPRT

SEQ ID NO: 1053 - protein, 9 aa, synthetic construct
  REGION 1..9: note = Description of Artificial Sequence: Synthetic peptide
NQWNGDPRT

SEQ ID NO: 1054 - protein, 9 aa, synthetic construct
  REGION 1..9: note = Description of Artificial Sequence: Synthetic peptide
NQWNGFPRT

SEQ ID NO: 1055 - protein, 9 aa, synthetic construct
  REGION 1..9: note = Description of Artificial Sequence: Synthetic peptide
NQWNGKPRT

SEQ ID NO: 1056 - protein, 9 aa, synthetic construct
  REGION 1..9: note = Description of Artificial Sequence: Synthetic peptide
NQWNGNPRT

SEQ ID NO: 1057 - protein, 9 aa, synthetic construct
  REGION 1..9: note = Description of Artificial Sequence: Synthetic peptide
NQWNGRPRT

SEQ ID NO: 1058 - protein, 9 aa, synthetic construct
  REGION 1..9: note = Description of Artificial Sequence: Synthetic peptide
NQWNGSPRT

SEQ ID NO: 1059 - protein, 9 aa, synthetic construct
  REGION 1..9: note = Description of Artificial Sequence: Synthetic peptide
NQWNGTPRT

SEQ ID NO: 1060 - protein, 9 aa, synthetic construct
  REGION 1..9: note = Description of Artificial Sequence: Synthetic peptide
NQWQADPRT

SEQ ID NO: 1061 - protein, 9 aa, synthetic construct
  REGION 1..9: note = Description of Artificial Sequence: Synthetic peptide
NQWQAFPRT

SEQ ID NO: 1062 - protein, 9 aa, synthetic construct
  REGION 1..9: note = Description of Artificial Sequence: Synthetic peptide
NQWQAKPRT

SEQ ID NO: 1063 - protein, 9 aa, synthetic construct
  REGION 1..9: note = Description of Artificial Sequence: Synthetic peptide
NQWQANPRT

SEQ ID NO: 1064 - protein, 9 aa, synthetic construct
  REGION 1..9: note = Description of Artificial Sequence: Synthetic peptide
NQWQARPRT

SEQ ID NO: 1065 - protein, 9 aa, synthetic construct
  REGION 1..9: note = Description of Artificial Sequence: Synthetic peptide
NQWQASPRT

SEQ ID NO: 1066 - protein, 9 aa, synthetic construct
  REGION 1..9: note = Description of Artificial Sequence: Synthetic peptide
NQWQATPRT

SEQ ID NO: 1067 - protein, 9 aa, synthetic construct
  REGION 1..9: note = Description of Artificial Sequence: Synthetic peptide
NQWQGDPRT

SEQ ID NO: 1068 - protein, 9 aa, synthetic construct
  REGION 1..9: note = Description of Artificial Sequence: Synthetic peptide
NQWQGFPRT

SEQ ID NO: 1069 - protein, 9 aa, synthetic construct
  REGION 1..9: note = Description of Artificial Sequence: Synthetic peptide
NQWQGKPRT

SEQ ID NO: 1070 - protein, 9 aa, synthetic construct
  REGION 1..9: note = Description of Artificial Sequence: Synthetic peptide
NQWQGNPRT

SEQ ID NO: 1071 - protein, 9 aa, synthetic construct
  REGION 1..9: note = Description of Artificial Sequence: Synthetic peptide
NQWQGRPRT

SEQ ID NO: 1072 - protein, 9 aa, synthetic construct
  REGION 1..9: note = Description of Artificial Sequence: Synthetic peptide
NQWQGSPRT

SEQ ID NO: 1073 - protein, 9 aa, synthetic construct
  REGION 1..9: note = Description of Artificial Sequence: Synthetic peptide
NQWQGTPRT

SEQ ID NO: 1074 - protein, 9 aa, synthetic construct
  REGION 1..9: note = Description of Artificial Sequence: Synthetic peptide
NQWSADPRT

SEQ ID NO: 1075 - protein, 9 aa, synthetic construct
  REGION 1..9: note = Description of Artificial Sequence: Synthetic peptide
NQWSAFPRT

SEQ ID NO: 1076 - protein, 9 aa, synthetic construct
  REGION 1..9: note = Description of Artificial Sequence: Synthetic peptide
NQWSAKPRT

SEQ ID NO: 1077 - protein, 9 aa, synthetic construct
  REGION 1..9: note = Description of Artificial Sequence: Synthetic peptide
NQWSANPRT

SEQ ID NO: 1078 - protein, 9 aa, synthetic construct
  REGION 1..9: note = Description of Artificial Sequence: Synthetic peptide
NQWSARPRT

SEQ ID NO: 1079 - protein, 9 aa, synthetic construct
  REGION 1..9: note = Description of Artificial Sequence: Synthetic peptide
NQWSASPRT

SEQ ID NO: 1080 - protein, 9 aa, synthetic construct
  REGION 1..9: note = Description of Artificial Sequence: Synthetic peptide
NQWSATPRT

SEQ ID NO: 1081 - protein, 9 aa, synthetic construct
  REGION 1..9: note = Description of Artificial Sequence: Synthetic peptide
NQWSGDPRT

SEQ ID NO: 1082 - protein, 9 aa, synthetic construct
  REGION 1..9: note = Description of Artificial Sequence: Synthetic peptide
NQWSGFPRT

SEQ ID NO: 1083 - protein, 9 aa, synthetic construct
  REGION 1..9: note = Description of Artificial Sequence: Synthetic peptide
NQWSGKPRT

SEQ ID NO: 1084 - protein, 9 aa, synthetic construct
  REGION 1..9: note = Description of Artificial Sequence: Synthetic peptide
NQWSGNPRT

SEQ ID NO: 1085 - protein, 9 aa, synthetic construct
  REGION 1..9: note = Description of Artificial Sequence: Synthetic peptide
NQWSGRPRT

SEQ ID NO: 1086 - protein, 9 aa, synthetic construct
  REGION 1..9: note = Description of Artificial Sequence: Synthetic peptide
NQWSGSPRT

SEQ ID NO: 1087 - protein, 9 aa, synthetic construct
  REGION 1..9: note = Description of Artificial Sequence: Synthetic peptide
NQWSGTPRT

SEQ ID NO: 1088 - protein, 9 aa, synthetic construct
  REGION 1..9: note = Description of Artificial Sequence: Synthetic peptide
  MOD_RES 1: note = Q or N
  MOD_RES 4: note = D, E, H, N, Q, or S
  MOD_RES 5: note = A, or G
  MOD_RES 6: note = D, F, K, N, R, S, or T
XQWXXXPRT

SEQ ID NO: 1089 - skipped

SEQ ID NO: 1090 - protein, 9 aa, synthetic construct
  REGION 1..9: note = Description of Artificial Sequence: Synthetic peptide
QQYYSTPFT

SEQ ID NO: 1091 - protein, 9 aa, synthetic construct
  REGION 1..9: note = Description of Artificial Sequence: Synthetic peptide
MQATQFPLT

SEQ ID NO: 1092 - protein, 9 aa, synthetic construct
  REGION 1..9: note = Description of Artificial Sequence: Synthetic peptide
QQRSNWPWT

SEQ ID NO: 1093 - protein, 9 aa, synthetic construct
  REGION 1..9: note = Description of Artificial Sequence: Synthetic peptide
QQFNSYPLT

SEQ ID NO: 1094 - protein, 8 aa, synthetic construct
  REGION 1..8: note = Description of Artificial Sequence: Synthetic peptide
HQWNNYGT

SEQ ID NO: 1095 - protein, 9 aa, synthetic construct
  REGION 1..9: note = Description of Artificial Sequence: Synthetic peptide
FQGSHVPLT

SEQ ID NO: 1096 - protein, 9 aa, synthetic construct
  REGION 1..9: note = Description of Artificial Sequence: Synthetic peptide
QQGQSYPYT

SEQ ID NO: 1097 - protein, 10 aa, synthetic construct
  REGION 1..10: note = Description of Artificial Sequence: Synthetic peptide
  MOD_RES 3: note = Y, W, or F
QSXDGTLSAL

SEQ ID NO: 1098 - protein, 9 aa, synthetic construct
  REGION 1..9: note = Description of Artificial Sequence: Synthetic peptide
QQSYSTPRT

SEQ ID NO: 1099 - protein, 8 aa, synthetic construct
  REGION 1..8: note = Description of Artificial Sequence: Synthetic peptide
QQYGSSPT

SEQ ID NO: 1100 - protein, 8 aa, synthetic construct
  REGION 1..8: note = Description of Artificial Sequence: Synthetic peptide
QQYHRSWT

SEQ ID NO: 1101 - protein, 9 aa, synthetic construct
  REGION 1..9: note = Description of Artificial Sequence: Synthetic peptide
FQGSHVPLT

SEQ ID NO: 1102-1199 - skipped (98 entries)

SEQ ID NO: 1200 - protein, 116 aa, synthetic construct
  REGION 1..116: note = Description of Artificial Sequence: Synthetic polypeptide
EVQLQQSGAELVKPGASVKLSCTASGFDIQDTYMHWVKQRPEQGLEWIGRIDPASGHTKYDPKFQVKATITTDTSSNTAYLQLSSLTSEDTAVYYCSRSGGLPDVWGAGTTVTVSS

SEQ ID NO: 1201 - protein, 116 aa, synthetic construct
  REGION 1..116: note = Description of Artificial Sequence: Synthetic polypeptide
QVHLQQSGPELVKPGASVKLSCKASGYTFTKYDINWVRQRPEQGLEWIGWIFPGDGRTDYNEKFKGKATLTTDKSSSTAYMEVSRLTSEDSAVYFCARYGPAMDYWGQGTSVTVAS

SEQ ID NO: 1202 - protein, 116 aa, synthetic construct
  REGION 1..116: note = Description of Artificial Sequence: Synthetic polypeptide
QVQLVQSGAEVKKPGASVKVSCKASGFDICDTYMHWVKQRPGQGLEWIGRIDPASGHTKYDPKFQVRATITTDTSTSTAYLELSSLRSEDTAVYYCARSGGLPDVWGQGTTVTVSS

SEQ ID NO: 1203 - protein, 116 aa, synthetic construct
  REGION 1..116: note = Description of Artificial Sequence: Synthetic polypeptide
QVQLVQSGAEVKKPGASVKLSCKASGFDICDTYMHWVRQRPGQGLEWIGRIDPASGHTKYDPKFQVRATMTTDTSTSTVYLELSSLRSEDTAVYYCARSGGLPDVWGQGTTVTVSS

SEQ ID NO: 1204 - protein, 116 aa, synthetic construct
  REGION 1..116: note = Description of Artificial Sequence: Synthetic polypeptide
QVQLVQSGAEVVKPGASVKLSCKASGFDICDTYMHWVRQRPGQGLEWMGRIDPASGHTKYDPKFQVRVTMTTDTSTSTVYLELSSLRSEDTAVYYCARSGGLPDVWGQGTTVTVSS

SEQ ID NO: 1205 - protein, 116 aa, synthetic construct
  REGION 1..116: note = Description of Artificial Sequence: Synthetic polypeptide
QVQLVQSGAEVKKPGASVKVSCKASGFDICDTYMHWVKQRPGQGLEWIGRIDPASGHTKYDPKFQVRATITRDTSTSTAYLELSSLRSEDTAVYYCSRSGGLPDVWGQGTTVTVSS

SEQ ID NO: 1206 - protein, 116 aa, synthetic construct
  REGION 1..116: note = Description of Artificial Sequence: Synthetic polypeptide
QVQLVQSGAEVKKPGASVKVSCKASGFDICDTYMHWVKQAPGQGLEWMGRIDPASGHTKYDPKFQVRATMTTDTSTSTAYLELSSLRSEDTAVYYCSRSGGLPDVWGQGTTVTVSS

SEQ ID NO: 1207 - protein, 116 aa, synthetic construct
  REGION 1..116: note = Description of Artificial Sequence: Synthetic polypeptide
QVQLVQSGAEVKKPGASVKLSCKASGFDIQDTYMHWVRQAPGQGLEWMGRIDPASGHTKYDPKFQVRVTMTTDTSTSTVYMELSSLRSEDTAVYYCSRSGGLPDVWGQGTTVTVSS

SEQ ID NO: 1208 - protein, 116 aa, synthetic construct
  REGION 1..116: note = Description of Artificial Sequence: Synthetic polypeptide
QVQLVQSGAEVKKPGASVKLSCKASGFDIQDTYMHWVRQAPGQGLEWMGRIDPASGHTKYDPKFQVRVTMTRDTSTSTVYMELSSLRSEDTAVYYCSRSGGLPDVWGQGTTVTVSS

SEQ ID NO: 1209 - protein, 116 aa, synthetic construct
  REGION 1..116: note = Description of Artificial Sequence: Synthetic polypeptide
QVQLVQSGAEVKKPGASVKVSCKASGFDIQDTYMHWVRQAPGQGLEWMGRIDPASGHTKYDPKFQVRVTMTRDTSTSTVYMELSSLRSEDTAVYYCARSGGLPDVWGQGTTVTVSS

SEQ ID NO: 1210 - protein, 116 aa, synthetic construct
  REGION 1..116: note = Description of Artificial Sequence: Synthetic polypeptide
QVQLVQSGAEVKKPGASVKVSCKASGFDIQDTYMHWVRQAPGQGLEWMGRIDPASGHTKYDPKFQVRVTMTRDTSTSTVYMELSSLRSEDTAVYYCARSGGLPDKWGQGTTVTVSS

SEQ ID NO: 1211 - protein, 116 aa, synthetic construct
  REGION 1..116: note = Description of Artificial Sequence: Synthetic polypeptide
QVQLVQSGAEVKKPGASVKVSCKASGFDIQDTYMHWVRQAPGQGLEWMGRIDPASGHTKYDPKFQVRVTMTRDTSTSTVYMELSSLRSEDTAVYYCARSGGLPDMWGQGTTVTVSS

SEQ ID NO: 1212 - protein, 116 aa, synthetic construct
  REGION 1..116: note = Description of Artificial Sequence: Synthetic polypeptide
QVQLVQSGAEVKKPGASVKVSCKASGFDIQDTYMHWVRQAPGQGLEWMGRIDPASGHTKYDPKFQVRVTMTRDTSTSTVYMELSSLRSEDTAVYYCARSGGLPDQWGQGTTVTVSS

SEQ ID NO: 1213 - protein, 116 aa, synthetic construct
  REGION 1..116: note = Description of Artificial Sequence: Synthetic polypeptide
QVQLVQSGAEVKKPGASVKVSCKASGFDIQDTYMHWVRQAPGQGLEWMGRIDPASGHTKYDPKFQVRVTMTRDTSTSTVYMELSSLRSEDTAVYYCARSGGLPDWWGQGTTVTVSS

SEQ ID NO: 1214 - protein, 116 aa, synthetic construct
  REGION 1..116: note = Description of Artificial Sequence: Synthetic polypeptide
  MOD_RES 28: note = D or E
  MOD_RES 29: note = I, P, or V
  MOD_RES 30: note = G, Q, S, or V
  MOD_RES 33: note = F or Y
  MOD_RES 34: note = I or M
  MOD_RES 102: note = L or M
  MOD_RES 105: note = E, I, K, L, M, Q, T, V, W, or Y
QVQLVQSGAEVKKPGASVKVSCKASGFXXXDTXXHWVRQAPGQGLEWMGRIDPASGHTKYDPKFQVRVTMTRDTSTSTVYMELSSLRSEDTAVYYCARSGGXPDXWGQGTTVTVSS

SEQ ID NO: 1215 - protein, 116 aa, synthetic construct
  REGION 1..116: note = Description of Artificial Sequence: Synthetic polypeptide
  MOD_RES 28: note = D or E
  MOD_RES 29: note = I, P, or V
  MOD_RES 30: note = G, Q, S, or V
  MOD_RES 33: note = F or Y
  MOD_RES 34: note = I or M
  MOD_RES 102: note = L or M
  MOD_RES 105: note = E, I, K, L, M, Q, T, V, W, or Y
QVQLVQSGAEVKKPGASVKVSCKASGFXXXDTXXHWVRQAPGQGLEWMGRIDPASGHTKYDPKFQVRVTMTRDTSTSTVYMELSSLRSEDTAVYYCSRSGGXPDXWGQGTTVTVSS

SEQ ID NO: 1216 - protein, 116 aa, synthetic construct
  REGION 1..116: note = Description of Artificial Sequence: Synthetic polypeptide
QVQLVQSGAEVKKPGASVKVSCKASGFDIQDTYMHWVRQAPGQGLEWMGRIEPASGHIKYSPKFQGRVTMTRDTSTSTVYMELSSLRSEDTAVYYCARSGGLPDWWGQGTTVTVSS

SEQ ID NO: 1217 - protein, 116 aa, synthetic construct
  REGION 1..116: note = Description of Artificial Sequence: Synthetic polypeptide
QVQLVQSGAEVKKPGASVKVSCKASGFDIQDTYMHWVRQAPGQGLEWMGRIEPASGHVKYSPKFQVRVTMTRDTSTSTVYMELSSLRSEDTAVYYCARSGGLPDWWGQGTTVTVSS

SEQ ID NO: 1218 - protein, 116 aa, synthetic construct
  REGION 1..116: note = Description of Artificial Sequence: Synthetic polypeptide
QVQLVQSGAEVKKPGASVKVSCKASGFDIQDTYMHWVRQAPGQGLEWMGRIEPASGHVKYDPKFQTRVTMTRDTSTSTVYMELSSLRSEDTAVYYCARSGGLPDWWGQGTTVTVSS

SEQ ID NO: 1219 - protein, 116 aa, synthetic construct
  REGION 1..116: note = Description of Artificial Sequence: Synthetic polypeptide
QVQLVQSGAEVKKPGASVKVSCKASGFDIQDTYMHWVRQAPGQGLEWMGRIDPASGHIKYDPKFQKRVTMTRDTSTSTVYMELSSLRSEDTAVYYCARSGGLPDMWGQGTTVTVSS

SEQ ID NO: 1220 - protein, 116 aa, synthetic construct
  REGION 1..116: note = Description of Artificial Sequence: Synthetic polypeptide
QVQLVQSGAEVKKPGASVKVSCKASGFDIQDTYMHWVRQAPGQGLEWMGRIDPASGHVKIDPKFQVRVTMTRDTSTSTVYMELSSLRSEDTAVYYCARSGGLPDMWGQGTTVTVSS

SEQ ID NO: 1221 - protein, 116 aa, synthetic construct
  REGION 1..116: note = Description of Artificial Sequence: Synthetic polypeptide
QVQLVQSGAEVKKPGASVKVSCKASGFDIQDTYMHWVRQAPGQGLEWMGRIDPASGHLKYDPKFQVRVTMTRDTSTSTVYMELSSLRSEDTAVYYCARSGGLPDMWGQGTTVTVSS

SEQ ID NO: 1222 - protein, 116 aa, synthetic construct
  REGION 1..116: note = Description of Artificial Sequence: Synthetic polypeptide
QVQLVQSGAEVKKPGASVKVSCKASGFDIQDTYMHWVRQAPGQGLEWMGRIDPASGHLKYDPKFQRRVTMTRDTSTSTVYMELSSLRSEDTAVYYCARSGGLPDMWGQGTTVTVSS

SEQ ID NO: 1223 - protein, 116 aa, synthetic construct
  REGION 1..116: note = Description of Artificial Sequence: Synthetic polypeptide
QVQLVQSGAEVKKPGASVKVSCKASGFDIQDTYMHWVRQAPGQGLEWMGRIDPASGHLKYDPKFQNRVTMTRDTSTSTVYMELSSLRSEDTAVYYCARSGGLPDKWGQGTTVTVSS

SEQ ID NO: 1224 - protein, 116 aa, synthetic construct
  REGION 1..116: note = Description of Artificial Sequence: Synthetic polypeptide
QVQLVQSGAEVKKPGASVKVSCKASGFDIQDTYMHWVRQAPGQGLEWMGRIEPASGHLKYDPKFQERVTMTRDTSTSTVYMELSSLRSEDTAVYYCARSGGLPDKWGQGTTVTVSS

SEQ ID NO: 1225 - protein, 116 aa, synthetic construct
  REGION 1..116: note = Description of Artificial Sequence: Synthetic polypeptide
QVQLVQSGAEVKKPGASVKVSCKASGFDIQDTYMHWVRQAPGQGLEWMGRIDPASGHLKYDPKFQGRVTITRDTSASTAYMELSSLRSEDTAVYYCARSGGLPDMWGQGTTVTVSS

SEQ ID NO: 1226 - protein, 116 aa, synthetic construct
  REGION 1..116: note = Description of Artificial Sequence: Synthetic polypeptide
QVQLVQSGAEVKKPGASVKVSCKASGFDIQDTYMHWVRQAPGQGLEWMGRIDPASGHLKYDPKFQGRVTITRDTSASTVYMELSSLRSEDTAVYYCARSGGLPDMWGQGTTVTVSS

SEQ ID NO: 1227 - protein, 116 aa, synthetic construct
  REGION 1..116: note = Description of Artificial Sequence: Synthetic polypeptide
QVQLVQSGAEVKKPGASVKVSCKASGFDIQDTYMHWVRQAPGQGLEWMGRIDPASGHTKYDPKFQGRATITTDTSASTAYLQLSSLRSEDTAVYYCARSGGLPDVWGQGTTVTVSS

SEQ ID NO: 1228 - protein, 116 aa, synthetic construct
  REGION 1..116: note = Description of Artificial Sequence: Synthetic polypeptide
QVQLVQSGAEVKKPGASVKVSCKASGFDIQDTYMHWVRQAPGQGLEWMGRIDPASGHTKYDPKFQVRATITTDTSASTAYLQLSSLRSEDTAVYYCARSGGLPDFWGQGTTVTVSS

SEQ ID NO: 1229 - protein, 116 aa, synthetic construct
  REGION 1..116: note = Description of Artificial Sequence: Synthetic polypeptide
QVQLVQSGAEVKKPGASVKVSCKASGFDIQDTYMHWVRQAPGQGLEWMGRIDPASGHTKYDPKFQGRATITTDTSASTAYLQLSSLRSEDTAVYYCARSGGLPDFWGQGTTVTVSS

SEQ ID NO: 1230 - protein, 116 aa, synthetic construct
  REGION 1..116: note = Description of Artificial Sequence: Synthetic polypeptide
QVQLVQSGAEVKKPGASVKVSCKASGFDIQDTYMHWVRQAPGQGLEWMGRIDPASGHTKYDPKFQGRATITTDTSASTAYLQLSSLRSEDTAVYYCARSGGLPDLWGQGTTVTVSS

SEQ ID NO: 1231 - protein, 116 aa, synthetic construct
  REGION 1..116: note = Description of Artificial Sequence: Synthetic polypeptide
QVQLVQSGAEVKKPGASVKVSCKASGFDIQDTYMHWVRQAPGQGLEWMGRIDPASGHSKYDPKFQVRATITTDTSASTAYLQLSSLRSEDTAVYYCARSGGLPDFWGQGTTVTVSS

SEQ ID NO: 1232 - protein, 116 aa, synthetic construct
  REGION 1..116: note = Description of Artificial Sequence: Synthetic polypeptide
QVQLVQSGAEVKKPGASVKVSCKASGFDIQDTYMHWVRQAPGQGLEWMGRIDPASGHYKYDPKFQVRATITTDTSASTAYLQLSSLRSEDTAVYYCARSGGLPDFWGQGTTVTVSS

SEQ ID NO: 1233 - protein, 122 aa, synthetic construct
  REGION 1..122: note = Description of Artificial Sequence: Synthetic polypeptide
EVQLVESGGGLVQPGGSLRLSCAVSGFTFSSYWMSWVRQAPGKGLEWVANIKEDGSEKNYVDSVKGRFTLSSDNAKNSLYLQMNSLRAEDTAVYYCAREDYDSYYKYGMDVWGQGTAVIVSS

SEQ ID NO: 1234 - protein, 119 aa, synthetic construct
  REGION 1..119: note = Description of Artificial Sequence: Synthetic polypeptide
QVQLQQWGAGLLKPSETLSLTCAVYGGSFTGFYWSWIRQPPGKGLEWIGEINHRGNTNYNPSLKSRVTMSVDTSKNQFSLNMISVTAADTAMYFCASPFYDFWSGSDYWGQGTLVTVSS

SEQ ID NO: 1235 - protein, 124 aa, synthetic construct
  REGION 1..124: note = Description of Artificial Sequence: Synthetic polypeptide
QVQLVQSGAEVKKPGASVKVSCKASGYDFTYYGISWVRQAPGQGLEWMGWISTYNGNTHYARMLQGRVTMTTDTSTRTAYMELRSLRSDDTAVYYCARENYYGSGAYRGGMDVWGQGTTVTVSS

SEQ ID NO: 1236 - protein, 453 aa, synthetic construct
  REGION 1..453: note = Description of Artificial Sequence: Synthetic polypeptide
QVQLVQSGAEVKKPGASVKVSCKASGYDFTYYGISWVRQAPGQGLEWMGWISTYNGNTHYARMLQGRVTMTTDTSTRTAYMELRSLRSDDTAVYYCARENYYGSGAYRGGMDVWGQGTTVTVSSASTKGPSVFPLAPSSKSTSGGTAALGCLVKDYFPEPVTVSWNSGALTSGVHTFPAVLQSSGLYSLSSVVTVPSSSLGTQTYICNVNHKPSNTKVDKKVEPKSCDKTHTCPPCPAPEAAGAPSVFLFPPKPKDTLMISRTPEVTCVVVDVSHEDPEVKFNWYVDGVEVHNAKTKPREEQYNSTYRVVSVLTVLHQDWLNGKEYKCKVSNKALPAPIEKTISKAKGQPREPQVYTLPPSREEMTKNQVSLTCLVKGFYPSDIAVEWESNGQPENNYKTTPPVLDSDGSFFLYSKLTVDKSRWQQGNVFSCSVMHEALHNHYTQKSLSLSPG

SEQ ID NO: 1237 - protein, 121 aa, synthetic construct
  REGION 1..121: note = Description of Artificial Sequence: Synthetic polypeptide
QLQLQESGPGLVKPSETLSLTCTVSGGSISSRSYYWGWIRQPPGKGLEWIGSIYYNGRTYYNPSLKSRVTISVDTSKNQFSLKLSSVTAADTAVYYCAREDYGDYGAFDIWGQGTMVTVSS

SEQ ID NO: 1238 - protein, 124 aa, synthetic construct
  REGION 1..124: note = Description of Artificial Sequence: Synthetic polypeptide
QVTLKESGPALVKPTQTLTLTCTFSGFSLSTSNMGVVWIRQPPGKALEWLAHILWDDREYSNPALKSRLTISKDTSKNQVVLTMTNMDPVDTATYYCARMSRNYYGSSYVMDYWGQGTLVTVSS

SEQ ID NO: 1239 - protein, 119 aa, synthetic construct
  REGION 1..119: note = Description of Artificial Sequence: Synthetic polypeptide
QVQLVQSGSELKKPGASVKVSCKASGYTFTLYGMNWVRQAPGQGLEWMGWINTYTGEPTYADDFKGRFVFSLDTSVSTAYLQISSLKAEDTAVYYCARDTAMDYAMAYWGQGTLVTVSS

SEQ ID NO: 1240 - protein, 119 aa, synthetic construct
  REGION 1..119: note = Description of Artificial Sequence: Synthetic polypeptide
QVQLVQSGSELKKPGASVKVSCKASGYTFTLYGMNWVKQAPGKGLKWMGWINTYTGEPTYADDFKGRFVFSLDTSVSTAYLQISSLKAEDTAVYFCARDTAMDYAMAYWGQGTLVTVSS

SEQ ID NO: 1241 - protein, 122 aa, synthetic construct
  REGION 1..122: note = Description of Artificial Sequence: Synthetic polypeptide
QVQLVQSGSELKKPGASVKVSCKASGYTFTNYGMNWVRQAPGQGLEWMGWINTYTGEPTYADDFKGRFVFSLDTSVSTAYLQISSLKAEDTAVYYCARDYGKYGDYYAMDYWGQGTLVTVSS

SEQ ID NO: 1242 - protein, 122 aa, synthetic construct
  REGION 1..122: note = Description of Artificial Sequence: Synthetic polypeptide
QVQLVQSGSELKKPGASVKVSCKASGYTFTNYGMNWVRQAPGKGLKWMGWINTYTGEPTYADDFKGRFVFSLDTSVSTAYLQISSLKAEDTAVYFCARDYGKYGDYYAMDYWGQGTLVTVSS

SEQ ID NO: 1243 - protein, 119 aa, synthetic construct
  REGION 1..119: note = Description of Artificial Sequence: Synthetic polypeptide
QVQLQQPGSVLVRPGASVKVSCKASGYTFTSSWMHWAKQRPGQGLEWIGEIHPNSGGTNYNEKFKGKATVDTSSSTAYVDLSSLTSEDSAVYYCARGDYYGYVSWFAYWGQGTLVTVSS

SEQ ID NO: 1244 - protein, 121 aa, synthetic construct
  REGION 1..121: note = Description of Artificial Sequence: Synthetic polypeptide
QVQLVQSGAEVKKPGASVKVSCKASGYTFTSSWMHWARQAPGQGLEWIGEIHPNSGGTNYAQKFQGRATLTVDTSSSTAYMELSRLRSDDTAVYYCARGDYYGYVSWFAYWGQGTLVTVSS

SEQ ID NO: 1245 - protein, 121 aa, synthetic construct
  REGION 1..121: note = Description of Artificial Sequence: Synthetic polypeptide
QVQLVQSGAEVKKPGASVKVSCKASGYTFTSSWMHWARQAPGQGLEWIGEIHPNSGGTNYAQKFQGRATMTVDTSISTAYMELSRLRSDDTAVYYCARGDYYGYVSWFAYWGQGTLVTVSS

SEQ ID NO: 1246 - protein, 121 aa, synthetic construct
  REGION 1..121: note = Description of Artificial Sequence: Synthetic polypeptide
QVQLVQSGAEVKKPGASVKVSCKASGYTFTSSWMHWARQAPGQGLEWIGEIHPNSGGTNYAQKFQGRVTMTVDTSISTAYMELSRLRSDDTAVYYCARGDYYGYVSWFAYWGQGTLVTVSS

SEQ ID NO: 1247 - protein, 121 aa, synthetic construct
  REGION 1..121: note = Description of Artificial Sequence: Synthetic polypeptide
QVQLVQSGAEVKKPGASVKVSCKASGYTFTSSWMHWARQAPGQGLEWMGEIHPNSGGTNYAQKFQGRVTMTVDTSISTAYMELSRLRSDDTAVYYCARGDYYGYVSWFAYWGQGTLVTVSS

SEQ ID NO: 1248 - protein, 119 aa, synthetic construct
  REGION 1..119: note = Description of Artificial Sequence: Synthetic polypeptide
QVQLVQSGAEVKKPGASVKVSCKASGYTFTSYDINWVRQAPGQGLEWMGWLNPNSGNTGYAQKFQGRVTMTADRSTSTAYMELSSLRSEDTAVYYCAREVPETAAFEYWGQGTLVTVSS

SEQ ID NO: 1249 - protein, 119 aa, synthetic construct; identical to SEQ ID NO: 1248
  REGION 1..119: note = Description of Artificial Sequence: Synthetic polypeptide

SEQ ID NO: 1250 - protein, 119 aa, synthetic construct
  REGION 1..119: note = Description of Artificial Sequence: Synthetic polypeptide
QVQLVQSGAEVKKPGASVKVSCKASGYTFTSYDINWVRQAPGQGLEWMGWLNPNSGYTGYAQKFQGRVTMTADRSTSTAYMELSSLRSEDTAVYYCAREVPETAAFEYWGQGTLVTVSS

SEQ ID NO: 1251 - protein, 119 aa, synthetic construct; identical to SEQ ID NO: 1248
  REGION 1..119: note = Description of Artificial Sequence: Synthetic polypeptide

SEQ ID NO: 1252 - protein, 119 aa, synthetic construct; identical to SEQ ID NO: 1248
  REGION 1..119: note = Description of Artificial Sequence: Synthetic polypeptide

SEQ ID NO: 1253 - protein, 119 aa, synthetic construct; identical to SEQ ID NO: 1248
  REGION 1..119: note = Description of Artificial Sequence: Synthetic polypeptide

SEQ ID NO: 1254 - protein, 119 aa, synthetic construct; identical to SEQ ID NO: 1248
  REGION 1..119: note = Description of Artificial Sequence: Synthetic polypeptide

SEQ ID NO: 1255 - protein, 119 aa, synthetic construct; identical to SEQ ID NO: 1250
  REGION 1..119: note = Description of Artificial Sequence: Synthetic polypeptide

SEQ ID NO: 1256 - protein, 119 aa, synthetic construct; identical to SEQ ID NO: 1250
  REGION 1..119: note = Description of Artificial Sequence: Synthetic polypeptide

SEQ ID NO: 1257 - protein, 119 aa, synthetic construct; identical to SEQ ID NO: 1250
  REGION 1..119: note = Description of Artificial Sequence: Synthetic polypeptide

SEQ ID NO: 1258 - protein, 119 aa, synthetic construct; identical to SEQ ID NO: 1250
  REGION 1..119: note = Description of Artificial Sequence: Synthetic polypeptide

SEQ ID NO: 1259 - protein, 119 aa, synthetic construct; identical to SEQ ID NO: 1250
  REGION 1..119: note = Description of Artificial Sequence: Synthetic polypeptide

SEQ ID NO: 1260 - protein, 118 aa, synthetic construct
  REGION 1..118: note = Description of Artificial Sequence: Synthetic polypeptide
QVQLQESGPGLVKPSETLSLTCTVSGGSISSYFWSWIRQPPGKGLEWIGYIYYSGNTKYNPSLKSRVTISIDTSKNQFSLKLSSVTAADTAVYYCARETGSYYGFDYWGQGTLVTVSS

SEQ ID NO: 1261 - protein, 120 aa, synthetic construct
  REGION 1..120: note = Description of Artificial Sequence: Synthetic polypeptide
QVQLQQWGAGLLKPSETLSLTCAVHGGSFSGYYWNWIRQPPGKGLEWIGEINHAGNTNYNPSLKSRVTISLDTSKNQFSLTLTSVTAADTAVYYCARGYCRSTTCYFDYWGQGTLVTVSS

SEQ ID NO: 1262 - protein, 121 aa, synthetic construct
  REGION 1..121: note = Description of Artificial Sequence: Synthetic polypeptide
EVQLLESGGGLVQPGKSLRLSCAVSGFTFSTYGMNWVRQAPGKGLEWVSSISGTGRTTYHADSVQGRFTVSRDNSKNILYLQMNSLRADDTAVYFCTKERGDYYYGVFDYWGQGTLVTVSS

SEQ ID NO: 1263 - protein, 122 aa, synthetic construct
  REGION 1..122: note = Description of Artificial Sequence: Synthetic polypeptide
QIQLVQSGPELKKPGETVKISCKASGYTFTTYGMSWVKQAPGKGLKWMGWMNTYSGVTTYADDFKGRFAFSLETSASTAYMQIDNLKNEDTATYFCAREGYVFDDYYATDYWGQGTSVTVSS

SEQ ID NO: 1264 - protein, 106 aa, synthetic construct
  REGION 1..106: note = Description of Artificial Sequence: Synthetic polypeptide
QIVLSQSPAILSASPGEKVTMTCRASSSVSYMYWYQQKPGSSPKPWIYATSNLASGVPDRFSGSGSGTSYSLTISRVEAEDAATYYCQQWSGNPRTFGGGTKLEIK

SEQ ID NO: 1265 - protein, 131 aa, synthetic construct
  REGION 1..131: note = Description of Artificial Sequence: Synthetic polypeptide
MKLPVRLLVLMFWIPASSSDVLMTQTPLSLPVSLGDQASISCRSSQTIVHSNGDTYLDWFLQKPGQSPKLLIYKVSNRFSGVPDRFSGSGSGTDFTLKISRVEAEDLGVYYCFQGSHVPYTFGGGTKLEIK

SEQ ID NO: 1266 - protein, 106 aa, synthetic construct
  REGION 1..106: note = Description of Artificial Sequence: Synthetic polypeptide
EIVLTQSPGTLSLSPGERATMSCRASSSVSYMYWYQQKPGQAPRPWIYATSNLASGIPDRFSGSGSGTDFTLTISRVEPEDFAVYYCQQWSGNPRTFGGGTKLEIK

SEQ ID NO: 1267 - protein, 106 aa, synthetic construct
  REGION 1..106: note = Description of Artificial Sequence: Synthetic polypeptide
EIVLTQSPGTLSLSPGERVTMSCRASSSVSYMYWYQQKPGQAPRPWIYATSNLASGVPDRFSGSGSGTDFTLTISRVEPEDFAVYYCQQWSGNPRTFGGGTKVEIK

SEQ ID NO: 1268 - protein, 106 aa, synthetic construct
  REGION 1..106: note = Description of Artificial Sequence: Synthetic polypeptide
EIVLTQSPGTLSASPGERVTLSCRASSSVSYMYWYQQKPGQAPRPWIYATSNLASGVPDRFSGSGSGTDFTLTISRLEPEDFAVYYCQQWSGNPRTFGGGTKLEIK

SEQ ID NO: 1269 - protein, 106 aa, synthetic construct
  REGION 1..106: note = Description of Artificial Sequence: Synthetic polypeptide
EIVLTQSPGTLSASPGERVTMSCRASSSVSYMYWYQQKPGQAPRLLIYATSNLASGVPDRFSGSGSGTDFTLTISRVEPEDFAVYYCQQWSGNPRTFGGGTKLEIK

SEQ ID NO: 1270 - protein, 106 aa, synthetic construct
  REGION 1..106: note = Description of Artificial Sequence: Synthetic polypeptide
EIVLTQSPGTLSLSPGERVTMSCRASSSVSYMYWYQQKPGQAPRPWIYATSNLASGVPDRFSGSGSGTDYTLTISRLEPEDFAVYYCQQWSGNPRTFGGGTKLEIK

SEQ ID NO: 1271 - protein, 106 aa, synthetic construct
  REGION 1..106: note = Description of Artificial Sequence: Synthetic polypeptide
EIVLTQSPGTLSLSPGERATLSCRASSSVSYMYWYQQKPGQAPRLLIYATSNLASGVPDRFSGSGSGTDYTLTISRLEPEDFAVYYCQQWSGNPRTFGGGTKLEIK

SEQ ID NO: 1272 - protein, 106 aa, synthetic construct
  REGION 1..106: note = Description of Artificial Sequence: Synthetic polypeptide
EIVLTQSPGTLSLSPGERATLSCRASSSVSYMYWYQQKPGQAPRLLIYATSNLASGIPDRFSGSGSGTDFTLTISRLEPEDFAVYYCQQWDGNPRTFGGGTKLEIK

SEQ ID NO: 1273 - protein, 106 aa, synthetic construct
  REGION 1..106: note = Description of Artificial Sequence: Synthetic polypeptide
EIVLTQSPGTLSLSPGERATLSCRASSSVSYMYWYQQKPGQAPRLLIYATSNLASGIPDRFSGSGSGTDFTLTISRLEPEDFAVYYCQQWHGNPRTFGGGTKLEIK

SEQ ID NO: 1274 - protein, 106 aa, synthetic construct
  REGION 1..106: note = Description of Artificial Sequence: Synthetic polypeptide
EIVLTQSPGTLSLSPGERATLSCRASSSVSYMYWYQQKPGQAPRLLIYATSNLASGIPDRFSGSGSGTDFTLTISRLEPEDFAVYYCQQWNGNPRTFGGGTKLEIK

SEQ ID NO: 1275 - protein, 106 aa, synthetic construct
  REGION 1..106: note = Description of Artificial Sequence: Synthetic polypeptide
EIVLTQSPGTLSLSPGERATLSCRASSSVSYMYWYQQKPGQAPRLLIYATSNLASGIPDRFSGSGSGTDFTLTISRLEPEDFAVYYCQQWQGNPRTFGGGTKLEIK

SEQ ID NO: 1276 - protein, 106 aa, synthetic construct
  REGION 1..106: note = Description of Artificial Sequence: Synthetic polypeptide
  MOD_RES 88: note = Q or N
  MOD_RES 91: note = D, E, H, N, Q, or S
  MOD_RES 92: note = A or G
  MOD_RES 93: note = D, F, K, N, R, S, or T
EIVLTQSPGTLSLSPGERATLSCRASSSVSYMYWYQQKPGQAPRLLIYATSNLASGIPDRFSGSGSGTDFTLTISRLEPEDFAVYYCXQWXXXPRTFGGGTKLEIK

SEQ ID NO: 1277 - protein, 106 aa, synthetic construct
  REGION 1..106: note = Description of Artificial Sequence: Synthetic polypeptide
EIVLTQSPGTLSLSPGERATLSCGASSSVSYMYWYQQKPGQAPRLLIYATSNLASGIPDRFSGSGSGTDFTLTISRLEPEDFAVYYCQQWEGNPRTFGGGTKLEIK

SEQ ID NO: 1278 - protein, 106 aa, synthetic construct
  REGION 1..106: note = Description of Artificial Sequence: Synthetic polypeptide
EIVLTQSPGTLSLSPGERATLSCRASSSVSYMYWYQQKPGQAPRLLIYATSNLASGIPDRFSGSGSGTDFTLTISRLEPEDFAVYYCSQWSGNPRTFGGGTKLEIK

SEQ ID NO: 1279 - protein, 106 aa, synthetic construct
  REGION 1..106: note = Description of Artificial Sequence: Synthetic polypeptide
EIVLTQSPGTLSLSPGERATLSCRASSSVSYMYWYQQKPGQAPRLLIYATSNLASGIPDRFSGSGSGTDFTLTISRLEPEDFAVYYCQQWSGNPRSFGGGTKLEIK

SEQ ID NO: 1280 - protein, 113 aa, synthetic construct
  REGION 1..113: note = Description of Artificial Sequence: Synthetic polypeptide
DIVMTQSPDSLAVSLGERATINCKSSQSILYSSNNKNYLAWYQQKPGQPPKLLIYWASTRESGVPDRFSGSGSGTDFTLTISSLQAEDVSVYYCQQYYSTPFTFGPGTKVDIK

SEQ ID NO: 1281 - protein, 112 aa, synthetic construct
  REGION 1..112: note = Description of Artificial Sequence: Synthetic polypeptide
DIMLTQTPLTSPVTLGQPASISCKSSQSLVHSDGNTYLSWLQQRPGQPPRLLFYKISNRFSGVPDRFSGSGAGTDFTLKISRVEAEDVGVYYCMQATQFPLTFGGGTKVEIK

SEQ ID NO: 1282 - protein, 107 aa, synthetic construct
  REGION 1..107: note = Description of Artificial Sequence: Synthetic polypeptide
EIVLTQSPATLSLSPGERATLSCRASQSVSSYLAWYQQKPGQAPRLLIYDASNRATGIPARFSGSGSGTDFTLTISSLEPEDFAVYYCQQRSNWPWTFGQGTKVEIK

SEQ ID NO: 1283 - protein, 214 aa, synthetic construct
  REGION 1..214: note = Description of Artificial Sequence: Synthetic polypeptide
EIVLTQSPATLSLSPGERATLSCRASQSVSSYLAWYQQKPGQAPRLLIYDASNRATGIPARFSGSGSGTDFTLTISSLEPEDFAVYYCQQRSNWPWTFGQGTKVEIKRTVAAPSVFIFPPSDEQLKSGTASVVCLLNNFYPREAKVQWKVDNALQSGNSQESVTEQDSKDSTYSLSSTLTLSKADYEKHKVYACEVTHQGLSSPVTKSFNRGEC

SEQ ID NO: 1284 - protein, 107 aa, synthetic construct [sequence omitted]

SEQ ID NO: 1285 - protein, 106 aa, synthetic construct
  REGION 1..106: note = Description of Artificial Sequence: Synthetic polypeptide
DIQLTQSPSFLSASVGDRVTITCSASSSVNYMHWYQQKPGKAPKLLIYSTSNLASGVPSRFSGSGSGTEFTLTISSLQPEDFATYYCHQWNNYGTFGQGTKVEIKR

SEQ ID NO: 1286 - protein, 113 aa, synthetic construct
  REGION 1..113: note = Description of Artificial Sequence: Synthetic polypeptide
DVVMTQSPLSLPVTLGQPASISCKSSQNIVHSDGNTYLEWFQQRPGQSPRRLIYKVSNRFSGVPDRFSGSGSGTDFTLKISRVEAEDVGVYYCFQGSHVPLTFGGGTKVEIKR

SEQ ID NO: 1287 - protein, 113 aa, synthetic construct
  REGION 1..113: note = Description of Artificial Sequence: Synthetic polypeptide
DVVMTQSPLSLPVTLGQPASISCKSSQNIVHSDGNTYLEWFQQRPGQSPRRLIYKVSNRFSGVPDRFSGSGSGTDFTLKISRVEAEDVGVYYCFQGSHVPLTFGQGTKVEIKR

SEQ ID NO: 1288 - protein, 113 aa, synthetic construct
  REGION 1..113: note = Description of Artificial Sequence: Synthetic polypeptide
DVVMTQTPLSLPVTPGEPASISCKSSQNIVHSDGNTYLEWYLQKPGQSPQLLIYKVSNRFSGVPDRFSGSGSGTDFTLKISRVEAEDLGVYYCFQGSHVPLTFGGGTKVEIKR

SEQ ID NO: 1289 - protein, 113 aa, synthetic construct
  REGION 1..113: note = Description of Artificial Sequence: Synthetic polypeptide
DVVMTQTPLSLPVSLGDQASISCKSSQNIVHSDGNTYLEWYLQKPGQSPKVLIYKVSNRFSGVPDRFSGSGSGTDFTLKISRVEAEDLGVYYCFQGSHVPLTFGGGTKVEIKR

SEQ ID NO: 1290 - protein, 113 aa, synthetic construct
  REGION 1..113: note = Description of Artificial Sequence: Synthetic polypeptide
DVVMTQSPLSLPVTLGQPASISCRSSQSIVHSNGNTYLDWFQQRPGQSPRRLIYKVSNRFSGVPDRFSGSGSGTDFTLKISRVEAEDVGVYYCFQGSHVPLTFGGGTKVEIKR

SEQ ID NO: 1291 - protein, 113 aa, synthetic construct
  REGION 1..113: note = Description of Artificial Sequence: Synthetic polypeptide
DVVMTQSPLSLPVTLGQPASISCRSSQSIVHSNGNTYLDWFQQRPGQSPRRLIYKVSNRFSGVPDRFSGSGSGTDFTLKISRVEAEDVGVYYCFQGSHVPLTFGQGTKVEIKR

SEQ ID NO: 1292 - protein, 113 aa, synthetic construct
  REGION 1..113: note = Description of Artificial Sequence: Synthetic polypeptide
DVVMTQTPLSLPVTPGEPASISCRSSQSIVHSNGNTYLDWYLQKPGQSPQLLIYKVSNRFSGVPDRFSGSGSGTDFTLKISRVEAEDLGVYYCFQGSHVPLTFGGGTKVEIKR

SEQ ID NO: 1293 - protein, 113 aa, synthetic construct
  REGION 1..113: note = Description of Artificial Sequence: Synthetic polypeptide
DVVMTQTPLSLPVSLGDQASISCRSSQSIVHSNGNTYLDWYLQKPGQSPKVLIYKVSNRFSGVPDRFSGSGSGTDFTLKINRVEAEDLGVYFCFQGSHVPLTFGGGTKLEIKR

SEQ ID NO: 1294 - protein, 107 aa, synthetic construct
  REGION 1..107: note = Description of Artificial Sequence: Synthetic polypeptide
DIQMNQSPSSLSASLGDTITITCHASQNINVLLSWYQQKPGNIPKLLIYKASNLHTGVPSRFSGSGSGTGFTFTISSLQPEDIATYYCQQGQSYPYTFGGGTKLEIK

SEQ ID NO: 1295 - protein, 107 aa, synthetic construct
  REGION 1..107: note = Description of Artificial Sequence: Synthetic polypeptide
DIQMTQSPSSLSASVGDRVTITCQASQDISNYLNWYQQKPGKAPKLLIYDASNLETGVPSRFSGSGSGTDFTFTISSLQPEDIATYYCQQYDNLPYTFGQGTKLEIK

SEQ ID NO: 1296 - protein, 107 aa, synthetic construct
  REGION 1..107: note = Description of Artificial Sequence: Synthetic polypeptide
DIQMTQSPSSLSASVGDRVTITCQASQNINVLLNWYQQKPGKAPKLLIYKASNLHTGVPSRFSGSGSGTDFTFTISSLQPEDIATYYCQQGQSYPYTFGQGTKLEIK

SEQ ID NO: 1297 - protein, 107 aa, synthetic construct
  REGION 1..107: note = Description of Artificial Sequence: Synthetic polypeptide
DIQMNQSPSSLSASVGDRVTITCQASQNINVLLSWYQQKPGKAPKLLIYKASNLHTGVPSRFSGSGSGTDFTFTISSLQPEDIATYYCQQGQSYPYTFGQGTKLEIK

SEQ ID NO: 1298 - protein, 111 aa, synthetic construct
  REGION 1..111: note = Description of Artificial Sequence: Synthetic polypeptide
  MOD_RES 32: note = VARIANT
  MOD_RES 33: note = VARIANT
  MOD_RES 36: note = VARIANT
  MOD_RES 93: note = VARIANT
QSVLTQPPSVSGAPGQRVTISCTSSSSDIGAXXGVXWYQQLPGTAPKLLIEGYYNRPSGVPDRFSGSKSGTSASLTITGLLPEDEGDYYCQSXDGTLSALFGGGTKLTVLG

SEQ ID NO: 1299 - protein, 111 aa, synthetic construct
  REGION 1..111: note = Description of Artificial Sequence: Synthetic polypeptide
QSVLTQPPSVSGAPGQRVTISCTSSSSDIGAGLGVHWYQQLPGTAPKLLIEGYYNRPSGVPDRFSGSKSGTSASLTITGLLPEDEGDYYCQSWDGTLSALFGGGTKLTVLG

SEQ ID NO: 1300 - protein, 111 aa, synthetic construct
  REGION 1..111: note = Description of Artificial Sequence: Synthetic polypeptide
QSVLTQPPSVSGAPGQRVTISCTSSSSDIGAGLGVHWYQQLPGTAPKLLIEGYYNRPSGVPDRFSGSKSGTSASLTITGLLPEDEGDYYCQSYDGTLSALFGGGTKLTVLG

SEQ ID NO: 1301 - protein, 124 aa, synthetic construct
  REGION 1..124: note = Description of Artificial Sequence: Synthetic polypeptide
  VARIANT 1: note = A, R, N, D, C, Q, E, G, H, I, L, K, M, F, P, S, T, W, Y, or V
  REGION 26..35: note = This region may encompass one of the following sequences: GFDIQDTYMH or DTYMH or KYDIN or GFEIQDTYMH or GFDPQDTY MH or GFDVQDTYMH or GFDIGDTYMH or GFDISDTYMH or GFDIVD TYMH or GFDIQDAYMH or GFDIQDSYMH or GFDIQDTFMH or GFD
  REGION 26..35: note = CONT. FROM ABOVE: IQDTYIH or GFDLQDTYMH or GFDIQDTYLH or GFDIGDTFIH or GFDIGDTFMH or GFDIGDTYIH or GFDIQDTFIH or GFDIQDTFMH or GFDIQDTYIH or GFDISDTFIH or GFDISDTFMH or GFDISDTYIH or GFDISDTYMH or GFDIVDTFIH or GFDIVDTFMH or
  REGION 26..35: note = CONT. FROM ABOVE: GFDIVDTYIH or GFDPGDTFIH or GFDPGDTFMH or GFDPGDTYIH or GFDPGDTYMH or GFDPQDTFIH or GFDPQDTFMH or GFDPQDTYIH or GFDPQDTYMH or GFDPSDTFIH or GFDPSDTFMH or GFDPSDTYIH or GFDPSDTYMH or GFDPVDTFIH or GFDPVDTFMH
  REGION 26..35: note = CONT. FROM ABOVE: or GFDPVDTYIH or GFDPVDTYMH or GFDVGDTFI H or GFDVGDTFMH or GFDVGDTYIH or GFDVGDTYMH or GFDVQDTF IH or GFDVQDTFMH or GFDVQDTYIH or GFDVSDTFIH or GFDVSDT FMH or GFDVSDTYIH or GFDVSDTYMH or GFDVVDTFIH or GFDVVD
  REGION 26..35: note = CONT. FROM ABOVE: TFMH or GFDVVDTYIH or GFDVVDTYMH or GFE IGDTFIH or GFEIGDTFMH or GFEIGDTYIH or GFEIGDTYMH or GF EIQDTFIH or GFEIQDTFMH or GFEIQDTYIH or GFEIQDTYMH or G FEISDTFIH or GFEISDTFMH or GFEISDTYIH or GFEISDTYMH or
  REGION 26..35: note = CONT. FROM ABOVE: GFEIVDTFIH or GFEIVDTFMH or GFEIVDTYIH or GFEIVDTYMH or GFEPGDTFIH or GFEPGDTFMH or GFEPGDTYIH or GFEPGDTYMH or GFEPQDTFIH or GFEPQDTFMH or GFEPQDTYIH or GFEPQDTYMH or GFEPSDTFIH or GFEPSDTFMH or GFEPSDTYIH
  REGION 26..35: note = CONT. FROM ABOVE: or GFEPSDTYMH or GFEPVDTFIH or GFEPVDTFM H or GFEPVDTYIH or GFEPVDTYMH or GFEVGDTFIH or GFEVGDTF MH or GFEVGDTYIH or GFEVGDTYMH or GFEVQDTFIH or GFEVQDT FMH or GFEVQDTYIH or GFEVQDTYMH or GFEVSDTFIH or GFEVSD
  REGION 26..35: note = CONT. FROM ABOVE: TFMH or GFEVSDTYIH or GFEVSDTYMH or GFE VVDTFIH or GFEVVDTFMH or GFEVVDTYIH or GFEVVDTYMH or GF TFSSYW or GGSFTGFY or GYDFTYYGIS or SRSYYWG or TSNMGVV or LYGMN or NYGMN or GYTFTSSWMH or GYTFTSYDIN or SYF
  REGION 26..35: note = CONT. FROM ABOVE: WS or GYYWN or GFTFSTYG or TYGMS
  VARIANT 38: note = A, R, N, D, C, Q, E, G, H, I, L, K, M, F, P, S, T, W, Y, or V
  VARIANT 48: note = A, R, N, D, C, Q, E, G, H, I, L, K, M, F, P, S, T, W, Y, or V
  REGION 50..66: note = This region may encompass one of the following sequences: RIDPASGHTKYDPKFQV or RIEPASGHIKYDPKFQG or RIDPASGHIKYDPKF QG or RIEPASGHIKYDPKFQV or WIFPGDGRTDYNEKFKG or RLDPASGHT K or RIEPASGHTK or RIDPESGHTK or RIDPASGHTK or RIDPAGGH
  REGION 50..66: note = CONT. FROM ABOVE: TK or RIDPASAHTK or RIDPASGHIK or RIDPA SGHLK or RIDPASGHVK or YDPKFQV or IDPKFQV or LDPKFQV or MDPKFQV or SDPKFQV or TDPKFQV or VDPKFQV or YIPKFQV or YNPKFQV or YRPKFQV or YSPKFQV or YDPKFRV or YDPKFQA
  REGION 50..66: note = CONT. FROM ABOVE: or YDPKFQD or YDPKFQE or YDPKFQG or YD PKFQH or YDPKFQK or YDPKFQL or YDPKFQM or YDPKFQN or Y DPKFQP or YDPKFQR or YDPKFQS or YDPKFQT or RIEPASGHIKYD PKFQG or RIEPASGHIKYSPKFQG or RIEPASGHVKYSPKFQV or RIEPAS
  REGION 50..66: note = CONT. FROM ABOVE: GHVKYDPKFQT or RIDPASGHIKYDPKFQK or RIDPA SGHVKIDPKFQV or RIDPASGHLKYDPKFQV or RIDPASGHLKYDPKFQR or RIDPASGHLKYDPKFQN or RIEPASGHLKYDPKFQE or PASGH or RIDPA SGHTKYDPKFQV or RIDPASGHLKYDPKFQG or RIDPASGHTKYDPKFQG or
  REGION 50..66: note = CONT. FROM ABOVE: RIDPASGHSKYDPKFQV or RIDPASGHYKYDPKFQV or IKEDGSEK or INHRGNT or WISTYNGNTHYARMLQG or SIYYNGRTYYNP SLKS or HILWDDREYSNPALKS or WINTYTGEPTYADDFKG or IHPNSGGT or YIYYSGNTKYNPSLKS or EINHAGNTNYNPSLKS or ISGTGRTT or
  REGION 50..66: note = CONT. FROM ABOVE: WMNTYSGVTTYADDFKG
  VARIANT 68: note = A, R, N, D, C, Q, E, G, H, I, L, K, M, F, P, S, T, W, Y, or V
  VARIANT 70: note = A, R, N, D, C, Q, E, G, H, I, L, K, M, F, P, S, T, W, Y, or V
  VARIANT 72: note = A, R, N, D, C, Q, E, G, H, I, L, K, M, F, P, S, T, W, Y, or V
  VARIANT 79: note = A, R, N, D, C, Q, E, G, H, I, L, K, M, F, P, S, T, W, Y, or V
  VARIANT 81: note = A, R, N, D, C, Q, E, G, H, I, L, K, M, F, P, S, T, W, Y, or V
  REGION 99..113: note = This region may encompass one of the following sequences: SGGLPDV or ARSGGLPDV or SGGLPDW or ARSGGLPDW or YGPAMD Y or LGGLPDV or SAGLPDV or SGGAPDV or SGGMPDV or SGGL PEV or SGGLPDK or SGGLPDM or SGGLPDQ or SGGLPDR or SG
  REGION 99..113: note = CONT. FROM ABOVE: GLPDS or SGGLPDT or SGGLPDH or SGGLPDF or SGGSPDV or ARSGGLPDM or ARSGGLPDK or SGGLPD or ARS GGLPDF or ARSGGLPDL or SGGLPDE or SGGLPDI or SGGLPDK or SGGLPDL or SGGLPDM or SGGLPDQ or SGGLPDT or SGGLPDW
  REGION 99..113: note = CONT. FROM ABOVE: or SGGLPDY or SGGMPDE or SGGMPDI or S GGMPDK or SGGMPDL or SGGMPDM or SGGMPDQ or SGGMPDT or SGGMPDV or SGGMPDW or SGGMPDY or AREDYDSYYKYGMDV or AS PFYDFWSGSDY or ENYYGSGAYRGGMDV or EDYGDYGAFDI or MSRNYYGS
  REGION 99..113: note = CONT. FROM ABOVE: SYVMDY or DTAMDYAMAY or DYGKYGDYYAMDY or ARGDYYGYVSWFAY or EVPETAAFEY or ETGSYYGFDY or GYCRSTTCYF DY or TKERGDYYYGVFDY or EGYVFDDYYATDY
  REGION 1..124: note = See specification as filed for detailed description of substitutions and preferred embodiments
XVQLVQSGAEVKKPGASVKVSCKASXXXXXXXXXXWVXQRPGQGLEWXGXXXXXXXXXXXXXXXXXRXTXTXDTSTSTXYXELSSLRSEDTAVYYCARXXXXXXXXXXXXXXXWGQGTTVTVSS

SEQ ID NO: 1302 - protein, 122 aa, synthetic construct
  REGION 1..122: note = Description of Artificial Sequence: Synthetic polypeptide
  VARIANT 1: note = A, R, N, D, C, Q, E, G, H, I, L, K, M, F, P, S, T, W, Y, or V
  REGION 26..35: note = This region may encompass one of the following sequences: GFDIQDTYMH or DTYMH or KYDIN or GFEIQDTYMH or GFDPQDTY MH or GFDVQDTYMH or GFDIGDTYMH or GFDISDTYMH or GFDIVD TYMH or GFDIQDAYMH or GFDIQDSYMH or GFDIQDTFMH or GFD
  REGION 26..35: note = CONT. FROM ABOVE: IQDTYIH or GFDLQDTYMH or GFDIQDTYLH or GFDIGDTFIH or GFDIGDTFMH or GFDIGDTYIH or GFDIQDTFIH or GFDIQDTFMH or GFDIQDTYIH or GFDISDTFIH or GFDISDTFMH or GFDISDTYIH or GFDISDTYMH or GFDIVDTFIH or GFDIVDTFMH or
  REGION 26..35: note = CONT. FROM ABOVE: GFDIVDTYIH or GFDPGDTFIH or GFDPGDTFMH or GFDPGDTYIH or GFDPGDTYMH or GFDPQDTFIH or GFDPQDTFMH or GFDPQDTYIH or GFDPQDTYMH or GFDPSDTFIH or GFDPSDTFMH or GFDPSDTYIH or GFDPSDTYMH or GFDPVDTFIH or GFDPVDTFMH
  REGION 26..35: note = CONT. FROM ABOVE: or GFDPVDTYIH or GFDPVDTYMH or GFDVGDTFI H or GFDVGDTFMH or GFDVGDTYIH or GFDVGDTYMH or GFDVQDTF IH or GFDVQDTFMH or GFDVQDTYIH or GFDVSDTFIH or GFDVSDT FMH or GFDVSDTYIH or GFDVSDTYMH or GFDVVDTFIH or GFDVVD
  REGION 26..35: note = CONT. FROM ABOVE: TFMH or GFDVVDTYIH or GFDVVDTYMH or GFE IGDTFIH or GFEIGDTFMH or GFEIGDTYIH or GFEIGDTYMH or GF EIQDTFIH or GFEIQDTFMH or GFEIQDTYIH or GFEIQDTYMH or G FEISDTFIH or GFEISDTFMH or GFEISDTYIH or GFEISDTYMH or
  REGION 26..35: note = CONT. FROM ABOVE: GFEIVDTFIH or GFEIVDTFMH or GFEIVDTYIH or GFEIVDTYMH or GFEPGDTFIH or GFEPGDTFMH or GFEPGDTYIH or GFEPGDTYMH or GFEPQDTFIH or GFEPQDTFMH or GFEPQDTYIH or GFEPQDTYMH or GFEPSDTFIH or GFEPSDTFMH or GFEPSDTYIH
  REGION 26..35: note = CONT. FROM ABOVE: or GFEPSDTYMH or GFEPVDTFIH or GFEPVDTFM H or GFEPVDTYIH or GFEPVDTYMH or GFEVGDTFIH or GFEVGDTF MH or GFEVGDTYIH or GFEVGDTYMH or GFEVQDTFIH or GFEVQDT FMH or GFEVQDTYIH or GFEVQDTYMH or GFEVSDTFIH or GFEVSD
  REGION 26..35: note = CONT. FROM ABOVE: TFMH or GFEVSDTYIH or GFEVSDTYMH or GFE VVDTFIH or GFEVVDTFMH or GFEVVDTYIH or GFEVVDTYMH or GF TFSSYW or GGSFTGFY or GYDFTYYGIS or SRSYYWG or TSNMGVV or LYGMN or NYGMN or GYTFTSSWMH or GYTFTSYDIN or SYF
  REGION 26..35: note = CONT. FROM ABOVE: WS or GYYWN or GFTFSTYG or TYGMS
  VARIANT 38: note = A, R, N, D, C, Q, E, G, H, I, L, K, M, F, P, S, T, W, Y, or V
  VARIANT 48: note = A, R, N, D, C, Q, E, G, H, I, L, K, M, F, P, S, T, W, Y, or V
  REGION 50..66: note = This region may encompass one of the following sequences: RIDPASGHTKYDPKFQV or RIEPASGHIKYDPKFQG or RIDPASGHIKYDPKF QG or RIEPASGHIKYDPKFQV or WIFPGDGRTDYNEKFKG or RLDPASGHT K or RIEPASGHTK or RIDPESGHTK or RIDPASGHTK or RIDPAGGH
  REGION 50..66: note = CONT. FROM ABOVE: TK or RIDPASAHTK or RIDPASGHIK or RIDPA SGHLK or RIDPASGHVK or YDPKFQV or IDPKFQV or LDPKFQV or MDPKFQV or SDPKFQV or TDPKFQV or VDPKFQV or YIPKFQV or YNPKFQV or YRPKFQV or YSPKFQV or YDPKFRV or YDPKFQA
  REGION 50..66: note = CONT. FROM ABOVE: or YDPKFQD or YDPKFQE or YDPKFQG or YD PKFQH or YDPKFQK or YDPKFQL or YDPKFQM or YDPKFQN or Y DPKFQP or YDPKFQR or YDPKFQS or YDPKFQT or RIEPASGHIKYD PKFQG or RIEPASGHIKYSPKFQG or RIEPASGHVKYSPKFQV or RIEPAS
  REGION 50..66: note = CONT. FROM ABOVE: GHVKYDPKFQT or RIDPASGHIKYDPKFQK or RIDPA SGHVKIDPKFQV or RIDPASGHLKYDPKFQV or RIDPASGHLKYDPKFQR or RIDPASGHLKYDPKFQN or RIEPASGHLKYDPKFQE or PASGH or RIDPA SGHTKYDPKFQV or RIDPASGHLKYDPKFQG or RIDPASGHTKYDPKFQG or
  REGION 50..66: note = CONT. FROM ABOVE: RIDPASGHSKYDPKFQV or RIDPASGHYKYDPKFQV or IKEDGSEK or INHRGNT or WISTYNGNTHYARMLQG or SIYYNGRTYYNP SLKS or HILWDDREYSNPALKS or WINTYTGEPTYADDFKG or IHPNSGGT or YIYYSGNTKYNPSLKS or EINHAGNTNYNPSLKS or ISGTGRTT or
  REGION 50..66: note = CONT. FROM ABOVE: WMNTYSGVTTYADDFKG
  VARIANT 68: note = A, R, N, D, C, Q, E, G, H, I, L, K, M, F, P, S, T, W, Y, or V
  VARIANT 70: note = A, R, N, D, C, Q, E, G, H, I, L, K, M, F, P, S, T, W, Y, or V
  VARIANT 72: note = A, R, N, D, C, Q, E, G, H, I, L, K, M, F, P, S, T, W, Y, or V
  VARIANT 79: note = A, R, N, D, C, Q, E, G, H, I, L, K, M, F, P, S, T, W, Y, or V
  VARIANT 81: note = A, R, N, D, C, Q, E, G, H, I, L, K, M, F, P, S, T, W, Y, or V
  REGION 97..111: note = This region may encompass one of the following sequences: SGGLPDV or ARSGGLPDV or SGGLPDW or ARSGGLPDW or YGPAMD Y or LGGLPDV or SAGLPDV or SGGAPDV or SGGMPDV or SGGL PEV or SGGLPDK or SGGLPDM or SGGLPDQ or SGGLPDR or SG
  REGION 97..111: note = CONT. FROM ABOVE: GLPDS or SGGLPDT or SGGLPDH or SGGLPDF or SGGSPDV or ARSGGLPDM or ARSGGLPDK or SGGLPD or ARS GGLPDF or ARSGGLPDL or SGGLPDE or SGGLPDI or SGGLPDK or SGGLPDL or SGGLPDM or SGGLPDQ or SGGLPDT or SGGLPDW
  REGION 97..111: note = CONT. FROM ABOVE: or SGGLPDY or SGGMPDE or SGGMPDI or S GGMPDK or SGGMPDL or SGGMPDM or SGGMPDQ or SGGMPDT or SGGMPDV or SGGMPDW or SGGMPDY or AREDYDSYYKYGMDV or AS PFYDFWSGSDY or ENYYGSGAYRGGMDV or EDYGDYGAFDI or MSRNYYGS
  REGION 97..111: note = CONT. FROM ABOVE: SYVMDY or DTAMDYAMAY or DYGKYGDYYAMDY or ARGDYYGYVSWFAY or EVPETAAFEY or ETGSYYGFDY or GYCRSTTCYF DY or TKERGDYYYGVFDY or EGYVFDDYYATDY
  REGION 1..122: note = See specification as filed for detailed description of substitutions and preferred embodiments
XVQLVQSGAEVKKPGASVKVSCKASXXXXXXXXXXWVXQRPGQGLEWXGXXXXXXXXXXXXXXXXXRXTXTXDTSTSTXYXELSSLRSEDTAVYYCXXXXXXXXXXXXXXXWGQGTTVTVSS

SEQ ID NO: 1303 - protein, 6 aa, synthetic construct
  REGION 1..6: note = Description of Artificial Sequence: Synthetic 6xHis tag
HHHHHH

SEQ ID NO: 1304 - protein, 111 aa, synthetic construct
  REGION 1..111: note = Description of Artificial Sequence: Synthetic polypeptide
QSVLTQPPSVSGAPGQRVTISCTSSSSDIGAALGVHWYQQLPGTAPKLLIEGYYNRPSGVPDRFSGSKSGTSASLTITGLLPEDEGDYYCQSWDGTLSALFGGGTKLTVLG

SEQ ID NO: 1305 - protein, 111 aa, synthetic construct
  REGION 1..111: note = Description of Artificial Sequence: Synthetic polypeptide
QSVLTQPPSVSGAPGQRVTISCTSSSSDIGAGSGVHWYQQLPGTAPKLLIEGYYNRPSGVPDRFSGSKSGTSASLTITGLLPEDEGDYYCQSWDGTLSALFGGGTKLTVLG

SEQ ID NO: 1306 - protein, 111 aa, synthetic construct
  REGION 1..111: note = Description of Artificial Sequence: Synthetic polypeptide
QSVLTQPPSVSGAPGQRVTISCTSSSSDIGAGQGVHWYQQLPGTAPKLLIEGYYNRPSGVPDRFSGSKSGTSASLTITGLLPEDEGDYYCQSWDGTLSALFGGGTKLTVLG

SEQ ID NO: 1307 - protein, 111 aa, synthetic construct
  REGION 1..111: note = Description of Artificial Sequence: Synthetic polypeptide
QSVLTQPPSVSGAPGQRVTISCTSSSSDIGAGLGVLWYQQLPGTAPKLLIEGYYNRPSGVPDRFSGSKSGTSASLTITGLLPEDEGDYYCQSWDGTLSALFGGGTKLTVLG

SEQ ID NO: 1308 - protein, 111 aa, synthetic construct; identical to SEQ ID NO: 1299
  REGION 1..111: note = Description of Artificial Sequence: Synthetic polypeptide

SEQ ID NO: 1309 - protein, 111 aa, synthetic construct; identical to SEQ ID NO: 1305
  REGION 1..111: note = Description of Artificial Sequence: Synthetic polypeptide

SEQ ID NO: 1310 - protein, 111 aa, synthetic construct; identical to SEQ ID NO: 1306
  REGION 1..111: note = Description of Artificial Sequence: Synthetic polypeptide

SEQ ID NO: 1311 - protein, 111 aa, synthetic construct; identical to SEQ ID NO: 1307
  REGION 1..111: note = Description of Artificial Sequence: Synthetic polypeptide

SEQ ID NO: 1312 - protein, 111 aa, synthetic construct
  REGION 1..111: note = Description of Artificial Sequence: Synthetic polypeptide
QSVLTQPPSVSGAPGQRVTISCTSSSSDIGAGLGVHWYQQLPGTAPKLLIEGYYNRPSGVPDRFSGSKSGTSASLTITGLLPEDEGDYYCQSFDGTLSALFGGGTKLTVLG

SEQ ID NO: 1313 - protein, 107 aa, synthetic construct
  REGION 1..107: note = Description of Artificial Sequence: Synthetic polypeptide
DIQMTQSPSSLSASVGDRVTITCRASQSINNYLNWYQQRPGKAPKLLIYAASSLQSGVPSRFSGSGSGTDFTLTISSLQPGDFATYYCQQSYSTPRTFGQGTKLEIK

SEQ ID NO: 1314 - protein, 107 aa, synthetic construct
  REGION 1..107: note = Description of Artificial Sequence: Synthetic polypeptide
EIVLTQSPGTLSLSPGERATLSCRASQSVRSSYLAWYQQKPGQAPRLLIYGASSRATGIPDRFSGSGSGTDFTLTISRLEPEDFAVYYCQQYGSSPTFGQGTRLEIK

SEQ ID NO: 1315 - protein, 106 aa, synthetic construct
  REGION 1..106: note = Description of Artificial Sequence: Synthetic polypeptide
DIQMTQSPSTLSASVGDRVTITCRASQTISSWLAWYQQTPEKAPKLLIYAASNLQSGVPSRFSGSGSGTEFTLTISSLQPDDFATYYCQQYHRSWTFGQGTKVEIT

SEQ ID NO: 1316 - protein, 112 aa, synthetic construct
  REGION 1..112: note = Description of Artificial Sequence: Synthetic polypeptide
DVLMTQTPLSLPVSLGDQASISCRSSQNIVHSDGNTYLEWYLQKPGQSPKLLIYKVSNRFSGVPDRFSGSGSGTDFTLKISRVEAEDLGIYYCFQGSHVPLTFGAGTKLELK

SEQ ID NO: 1317 - protein, 14 aa, synthetic construct
  REGION 1..14: note = Description of Artificial Sequence: Synthetic peptide
WVRQAPGQGLEWMG

SEQ ID NO: 1318 - protein, 30 aa, synthetic construct
  REGION 1..30: note = Description of Artificial Sequence: Synthetic polypeptide
RVTMTRDTSTSTVYMELSSLRSEDTAVYYC

SEQ ID NO: 1319 - protein, 30 aa, synthetic construct
  REGION 1..30: note = Description of Artificial Sequence: Synthetic polypeptide
RATITTDTSASTAYLQLSSLRSEDTAVYYC

SEQ ID NO: 1320 - protein, 30 aa, synthetic construct
  REGION 1..30: note = Description of Artificial Sequence: Synthetic polypeptide
RVTITRDTSASTVYMELSSLRSEDTAVYYC

SEQ ID NO: 1321 - protein, 30 aa, synthetic construct
  REGION 1..30: note = Description of Artificial Sequence: Synthetic polypeptide
RVTITRDTSASTAYMELSSLRSEDTAVYYC

SEQ ID NO: 1322 - protein, 32 aa, synthetic construct
  REGION 1..32: note = Description of Artificial Sequence: Synthetic polypeptide
RVTMTRDTSTSTVYMELSSLRSEDTAVYYCSR

SEQ ID NO: 1323 - protein, 32 aa, synthetic construct
  REGION 1..32: note = Description of Artificial Sequence: Synthetic polypeptide
RVTMTRDTSTSTVYMELSSLRSEDTAVYYCAR

SEQ ID NO: 1324 - protein, 15 aa, synthetic construct
  REGION 1..15: note = Description of Artificial Sequence: Synthetic peptide
WYQQKPGQAPRLLIY

SEQ ID NO: 1325 - protein, 32 aa, synthetic construct
  REGION 1..32: note = Description of Artificial Sequence: Synthetic polypeptide
GVPDRFSGSGSGTDYTLTISRLEPEDFAVYYC

SEQ ID NO: 1326-2000 - skipped (675 entries)

SEQ ID NO: 2001 - DNA, 1001 bp, Homo sapiens
  source 1..1001: mol_type = other DNA
cattctgcagcagggacagaagcctgggaagttgagtccacgaagagggttctcggactcccttccctaagcgagtgactgatgtttcctgactctggccctggttgtgccgtgaggccacagtgagggcagctggagagctcaggatctgccaccttagcacacatgggatgttaggcacttctcgctatgcctcagtttctgtggtctcatgaaggaacattagtactttcttcattaatgcacataaaatgcttggcagtgcttggcatagagatagatgctcaataaatgttggccactattattatagccccctacaaacaaggaggatgagattgaaaacaatgtttcctaaaaatgagggtataatgggcatcctatccatatttcaggggtaggaaaacagccttctgagatcatttatatgaagggtatggatggacaaatccttatcagcctaaaatattcctatctatgattgctatgtcatttctttargattaatcaatcctcttcatgagtcatatttcaatatattacacatacacataattataaaagaaccaagttgcataaaatttataaaatggagactaggaaaggaaaaacccgctcataaaacccaacaagagagcttaaaatgaaagtctgaaagtgcaggtaggtatttgtttaaatacttggtaaaagaaaatgttcaattcagtagctgtgacagacacaattttaaggggtgtgggcataagagaaacagaaagtccatctgtcaaaggggtaaatatttagtcaagtcttagatagtatttctgtaaacagaaatttcaatggaaaatttccaacctgagagcaaataatttaagatgggtttaatataagaattaaagctctcgtctccatgtcgctgcccagcctgagacccagccctctgagtccttgtggcagttcggctttttctttcttgttccctcaactacaactggacactataattttctttc

SEQ ID NO: 2002 - DNA, 1001 bp, Homo sapiens
  source 1..1001: mol_type = other DNA
gactattaaccaatcatgaaaaacattttcaaataatacttaatgacaaggaaaatgctcacaataatatgttaactataaaagcctgataaaagtaagaattcagcataatcccatattttaagggaaataagtatatgtacagaaaaaagactgaaagacaacaaaatgtaaaattgtttatgaagactgcctgtggtttatttaggttatctttgttctttctatctttttatattttccagtaaaaatgagtttatattgctgtagaatcaggaaacaaaatattgtgatgcaaatatggctatgggactcttaagaaaaaggtttttatattgatttgagtatataacagagtaacatagcactaaagttcaaagtacaaggccaccatatgaatttgattaagtaaaggaaaagaattattgaaaacaaggatgcaagtaattactttttcatttggattgtttgttcaaaatgttgctgccaagttatctcacrttatttcagctaagctcagagagaccccaacctcctgagttcagcatgtcattggctgttctgttcctacacattgccctcttgcattttttcatttccctggcttcaactgcctagtcctcctaaccttaactcttgggattgacctgctgtgtatctcctatttttcaaaaaaatgctttatgcaagtttctaatacccaccaaatacactagtattgtacttcattcggtacagtgcaatcaaacacaggttgagtattctttatctaaagtgcttgggactggaggtgttgcaggtttgggaattttttggattttggaatatatgcatatacataatgagatatcttggggatgtgacccaagtctaaacatgaaattcacttatgtttcacatataccttatacacatagcctgaaggttaattttatacagtattttaatttaataagatatttaaaataacttatgcaatatttcaaatgcatgaaacaaag

SEQ ID NO: 2003 - DNA, 1001 bp, Homo sapiens
  source 1..1001: mol_type = other DNA
gaggtgcattcctcgagagaagattgacagttgcttttgcaggtactggatatattagcaatccagaatatctttttttgtttttgttttcttgttgttgttgttttaaagacagggtcttgctctgtcatccaggctggaatgcagtggcacaatcatagctcactgcaaccatggattcctgagctcaagcaatcctcctgcctcagcctcctgagtagctgggactagagctgcacaccaccacacctagctaatttttaaaacttttttatagagatggggttgccccggctgatcttgaactcctgggctcaagtgtttcccctgcctcagcctcccaaagtgctgggattacaggcatgaaccaccacatccagtacaggatgtctttaaattatgttatcagtttggtgtttccagaattcttggagagtagaaattctgtccctaaacttgtgtgatggtaaaatacaaattcttaaacatgtttttctcccvtttactcagaggcaaaatcaaggtagacaagtttccttactaactcgttaagaaaggcaggatttttttttttttttagtattacccagtgtgtgactttcagggtctaagccttatgtaaaataaaaaggtctacagtcagacttcccaccttcattaatacctgagaaattaatgaaatagagaatacaaataaagaaaaatctatcaagtgtgggcactagattttgtctccttttctcctgaactaaaccacgtaaatggaatctccaggtccccagagactggcagatattccttaagcaaaaccgtttcaatgtccttgcttacctttctgaattcatatgttccattatttgtggtctttaaggatttctcttttactttttgccaggccagcaatatatttaataatctgttgtttaaaaaatatttacacaattataggtttttttaaatcaaaagtctcattatgattcctaagtctgccatattgctaa

SEQ ID NO: 2004 - DNA, 1001 bp, Homo sapiens
  source 1..1001: mol_type = other DNA
taagttcaattataatatgtataggaataaggtacctcaatatgtaaaaaatcatcaaatgaactgggcagtgaaaatcaactggctttaactgttcatcatatttgagtcatttctctcaaactcaaacatactaaaacttcttcagcaaatccatcagtatttggttttcttttatatgctgataaaatcatagataatcttacaattgacatcctccaaaagattcaaagctgattcgaaccttggagttcaggttcctggcttctctgtctactgggggtcaggatacaggaagcacaaggaggaggggagaagattgtgtgggcaaaggggcagggaaggggccaccactcaccaccactgcaggacgaggcgctgagtaagggacggggctgctcccagcagaatccacaaagtagctcattctgctctcagcacctgtgtgagagaaggcgttggctgagcctctggatgctcacaggtttgtggattagaatmcacaaggaagacacgaaccttagaactaaaagtctccttaggagccaaccagttcacttctttgcatggcagggaaagcaatggaaattcagaaagatcagtgactaacccccagcaccggtaagagcagacctcagacagaaccagttccctggttgcaaggtaacatggataacagaccatgtctacacactgcagacagcaagcagtaaaccagtgcacaagaggcacatttttgtagggtttctgagcaggaaccagttcttgtgtgtctcccccacccacaaccaggcctggcagataagtaggcatacaatacacagttggggtgtaaattaattgataaaggaataaacatagaaaggattggagaaaggaaggatggaaaaagctctcctgaagaggtatgtcacccagtaacccaagaaacagataaacagagagaaaccctgcaaaagggattgagcattattgatcttgaaaaaaggagaagggctatt

SEQ ID NO: 2005 - DNA, 1001 bp, Homo sapiens
  source 1..1001: mol_type = other DNA
gacctagaaggatgcttatgaaatgctaagtggaaaaaaagtgtgttgcaatatgggtcataagaaatggtgtcttttcttttctaaagagagaataggctgggtgcagtggctcactcctgtaatccctacaatttgggaggccaaagcaggaagatcacttgaggccaggagttcgagaccaacctgggcaacatagtgagacctctgtatccataaaaaatttttaaaaattagccagatgtggtggcacgtgcctgtagtcacagctactctgagactgaggtggaaggatcacttgaacccaaggaatttgaggctgcagtgaaccgtgatcacaccactgcacttcaacctgggtgacagagcaagaccgtgtctcaaaaaaaagagaaagaaaaaactatatatgtgtgtgtatctgcagaaatcaggttagaaatacacacattacacacacacatacatatgtgtgtgtatatatatataatttatttaatrctaacgttattggtaggttctttaaacattttttgaaacaaatgtggaaattaaaaaataacatgggctggtggggaatgttaatgagggggaggctgtgcacgtgggggcagggagaacatgggaacactatgtactttccactccattttgatgtaaacctaaaactgctctaataaatactaagttattaaaagcaaccgtgaggccaggcgcagtggctgatgcctgtaatcccagcactttgggaggccaaggcaggtgcatcacttgaggtcaggagttccagaccatcctggccaacatagtgaaaccccatctctacaaaaaatacaaaaattagctggacgtggtggtacacgcctgtaatcccagctcctcgggaggctgaggcaggagaatcgcttgaacccggaaggcacaggttgcagtgagccgagatcgcgccacggcactccagcctgggtgacagagagactccatttcaaaactaactagct

SEQ ID NO: 2006 - DNA, 1001 bp, Homo sapiens
  source 1..1001: mol_type = other DNA
actgctagatctgacatacagagaagagcaattacagggctcttcaaagatgcaggtgctgccttcacaaacctattttgcaaggcatatatcaagggtattaaatatattagctgggcgtgatcaggcatgatggcacatacctgtagtcccagctacttgggaggctgaggcatgagaatcgcttgaacccgggagacagaggctgcagtgagccaagattgcaccactgcaatccagcctgggtgacagagtgactctgtctccaaaaaaataagtaaataaataaaaagaagttcttaagagagaaggaaaatgatataggtttgaaactcagatctacatgaacaatggaagagcgttacagagataacaggtgaaggtaaaacaaaacccaaagggtataatgggtttcccttcccttctctctttctacgaatgcagtgaaaggtgagttgtaatcatttctaatgatttgtgcacattcttataaatattaamttaattcatacacatgggtaaacatatatatattcctagattattattgtttatatgacaatttttaattctagtgaaataaagatgttaattttaatctataaaactacaaattacctaaaattatttttgtcccttttctacataaacttgttagaaaaaaattatgtgctcttcatttaacagaaatttgaaatcaagagaactgataatgctcttattttccgtagaaggttttggattgaccagtttgcgtcagggaaaatatttttgtgcttttcaccttcctcaaagctgacagatagttaactctctcctttcttccttggcatgcaggtttcctccatgttttaggtgggcctagagatgtaaagtcatggcctttttcaaaagctacaagctgagccaagcatggtggctcatggctgtaatcccagcacttttggaggctgaggtgagtggaacacctgaggttgggagttccagaccagcctaggaaa

SEQ ID NO: 2007 - DNA, 1001 bp, Homo sapiens
  source 1..1001: mol_type = other DNA
acaaatggggagggcctgtgtcctctacaaaggagtccccgtagaggaaccccttccacagggcaccccttccacagggaggggctgggccagcagccgtgcgcagtgggattcccgtgtctgggggcttcagtcttctcaggggacacacgcccaagaggcagggagcttgggtgggggctgcacagctgtgggcttctgttctgggctgctgctgcctagtgctgcggcttctgaagtgttacccagcctcagagttcagccctcatctgtaaagtaggtttaagaaaaccgactccaggtgaagaaaatggagcaatatgcactgggcacggcacccattcctgttcccagagaccgcggtggttctcactgtgcggcatgtgcctctcacctcccctcccttccaaccacctttcgggtgctgagccgcgtcgaagggactttttgtctcctacctcagaggctctcccaagccagccctggccccactgtcgggcwcagctcagcacgcaggcgccgggaccttacctgtctggctgccgacagtcaggttctgctgcagaagcacgttctctatgcagcagccaatgttcacgctgggggtccgtgcgatcctcagcacgctgaccacgtcatacaagccccgcatgttcaagaagacggtgtcattctgcagagcctggtccagcaggctgttgtccgtcttattgatccagtacacgttgggcctggggtagccgtttatggatgtacacgtgaaggtgagctcatcctgggaggggctgtggggggcgctgacgacgggcacgctgaagtttgctgcaggggagggaaacagattgtgagagatgccagaccctgctggtcaagaaacagagggtacacggtgccaaggctgggtcagaggggaggcggcccattgtgccccgacatgggtgacaggccaggaccagggctgtggtccgagcagcaggctccgccctgtcctgcccaagagt

SEQ ID NO: 2008 - DNA, 1001 bp, Homo sapiens
  source 1..1001: mol_type = other DNA
caaagaaggttttatcttcttttgtgtaatccaccaaagagatgtcactgacgttcaccattagcttgtccccttcttgcaaggagaacatggctccgaggtagatgggctggaaccagttgctacctacttcgcatacagacttggtccccatgaggagctgggttggctcagggtagctgtctgttaccttggtgatgaccacagtgatggagtctggcttgtttggtcggcctgcttgtctgatttcactgcactcagaggtcatcccacggaatgtgacctgggagtaaatgaagtagtctcccgactctgggatcagcaggaatttgttggtatagttcattcggttcttggtgaaggccaggcctagttcatgttcccagtgcagagctgggaactgatttttaaagtgctgtgtgggagtttgtctcacaactggaaagacaagaaagaggattaattttctcattgggaaactgtagactttgcttaaaaaghgtctcatatcattttcaaaatagactaaagtgatcgaatatacctaacagctaaaaactgctttggggaggaatgaatgaagaatatgtgactggacatacacatttgttcaaagagaataacatcttggactagtgacctggggcaaattactttgcctttctgagactgagtggtctgacctgaaaatttttaattttacctgagacctatgatcctggagaacaatgaaggttaaggaatccccctattcttctgtgtttaggaaaatggcttgctgcaagaattatcctttcccaaatgactcagataaaactcatcgatgcctctcttgtttacgtatgacaaggccaggcaccagacccttcaaattcccattctttgccccataagtgattggctgaactgttttatccccattcatcaattggaacaaaacacttgtcttacaggcatgaggtaagtgatagaaacttggcatctccctggtcctaatcctc

SEQ ID NO: 2009 - DNA, 1001 bp, Homo sapiens
  source 1..1001: mol_type = other DNA
ggtcatggtggctcacgcctgtaatcccagcactttgggaggctgaggaaggaggatcacttgaggtgaggagcttgagaccagcctggccaacatggtgaaaccccatctctactaaaaatacaaaaattagccgggcgtggtggtgcacacctgtaatcccagctactcgggagggtgaggcaggagaattgcttgaacctgggaagtggtggttgcagtgagccgagatctcaccactgcactccaggctgggcaacacagcaagactctgtctaaaaaaaaaaaaaaaaagaaagaaaaaaagagttatattatttacgactcttttagcttcactttcttataagattgttgtgagaagtgagtaagacacatgcaaagtggtaaactgcctggctgtcataaaagtcttggctactatcacggctgggaggcaaaggagattcagagaagggcagaatgactgcataaggtgatctgcctgtaactcgtgtttcytcctttctagtataaagagataaaggacttcaaggtcttaaactggtgagggagtattacagcctttgtatggaaaggtttgactttgtgtctctgcttaaacccccattgtgttgcccctaccaattattgtgctgcccccttgtggttaactgtgctaagacctttcttttgctcttctcccattacatttcccacccttccccactcccttttagacccctcctcttagctcccagtttcccaaactgtgtgccaaggtgcccagagcacctcaggcttgaacttgtgttttgagttggttcatggtttcaatattagatacctacacccgtttctacaatgtcatgtctttgtaaagatgtattttcagaggttgctccgataaaaagcaactactacatgaaaatgaatgtagaacaggaaatgacagtgtggtattgtccaatttgattctaaggtttgataagttctacagtgctctacactaagttgtaagg

SEQ ID NO: 2010-2059 - skipped (50 entries)

SEQ ID NO: 2060 - DNA, 1001 bp, Homo sapiens; identical to SEQ ID NO: 2001
  source 1..1001: mol_type = other DNA

SEQ ID NO: 2061 - DNA, 1001 bp, Homo sapiens; identical to SEQ ID NO: 2002
  source 1..1001: mol_type = other DNA

SEQ ID NO: 2062 - DNA, 1001 bp, Homo sapiens
  source 1..1001: mol_type = other DNA
gaggtgcattcctcgagagaagattgacagttgcttttgcaggtactggatatattagcaatccagaatatctttttttgtttttgttttcttgttgttgttgttttaaagacagggtcttgctctgtcatccaggctggaatgcagtggcacaatcatagctcactgcaaccatggattcctgagctcaagcaatcctcctgcctcagcctcctgagtagctgggactagagctgcacaccaccacacctagctaatttttaaaacttttttatagagatggggttgccccggctgatcttgaactcctgggctcaagtgtttcccctgcctcagcctcccaaagtgctgggattacaggcatgaaccaccacatccagtacaggatgtctttaaattatgttatcagtttggtgtttccagaattcttggagagtagaaattctgtccctaaacttgtgtgatggtaaaatacaaattcttaaacatgtttttctcccrtttactcagaggcaaaatcaaggtagacaagtttccttactaactcgttaagaaaggcaggatttttttttttttttagtattacccagtgtgtgactttcagggtctaagccttatgtaaaataaaaaggtctacagtcagacttcccaccttcattaatacctgagaaattaatgaaatagagaatacaaataaagaaaaatctatcaagtgtgggcactagattttgtctccttttctcctgaactaaaccacgtaaatggaatctccaggtccccagagactggcagatattccttaagcaaaaccgtttcaatgtccttgcttacctttctgaattcatatgttccattatttgtggtctttaaggatttctcttttactttttgccaggccagcaatatatttaataatctgttgtttaaaaaatatttacacaattataggtttttttaaatcaaaagtctcattatgattcctaagtctgccatattgctaa

SEQ ID NO: 2063 - DNA, 1001 bp, Homo sapiens; identical to SEQ ID NO: 2004
  source 1..1001: mol_type = other DNA

SEQ ID NO: 2064 - DNA, 1001 bp, Homo sapiens; identical to SEQ ID NO: 2005
  source 1..1001: mol_type = other DNA

SEQ ID NO: 2065 - DNA, 1001 bp, Homo sapiens; identical to SEQ ID NO: 2006
  source 1..1001: mol_type = other DNA

SEQ ID NO: 2066 - DNA, 1001 bp, Homo sapiens; identical to SEQ ID NO: 2007
  source 1..1001: mol_type = other DNA

SEQ ID NO: 2067 - DNA, 1001 bp, Homo sapiens
  source 1..1001: mol_type = other DNA
caaagaaggttttatcttcttttgtgtaatccaccaaagagatgtcactgacgttcaccattagcttgtccccttcttgcaaggagaacatggctccgaggtagatgggctggaaccagttgctacctacttcgcatacagacttggtccccatgaggagctgggttggctcagggtagctgtctgttaccttggtgatgaccacagtgatggagtctggcttgtttggtcggcctgcttgtctgatttcactgcactcagaggtcatcccacggaatgtgacctgggagtaaatgaagtagtctcccgactctgggatcagcaggaatttgttggtatagttcattcggttcttggtgaaggccaggcctagttcatgttcccagtgcagagctgggaactgatttttaaagtgctgtgtgggagtttgtctcacaactggaaagacaagaaagaggattaattttctcattgggaaactgtagactttgcttaaaaagwgtctcatatcattttcaaaatagactaaagtgatcgaatatacctaacagctaaaaactgctttggggaggaatgaatgaagaatatgtgactggacatacacatttgttcaaagagaataacatcttggactagtgacctggggcaaattactttgcctttctgagactgagtggtctgacctgaaaatttttaattttacctgagacctatgatcctggagaacaatgaaggttaaggaatccccctattcttctgtgtttaggaaaatggcttgctgcaagaattatcctttcccaaatgactcagataaaactcatcgatgcctctcttgtttacgtatgacaaggccaggcaccagacccttcaaattcccattctttgccccataagtgattggctgaactgttttatccccattcatcaattggaacaaaacacttgtcttacaggcatgaggtaagtgatagaaacttggcatctccctggtcctaatcctc

SEQ ID NO: 2068 - DNA, 1001 bp, Homo sapiens; identical to SEQ ID NO: 2009
  source 1..1001: mol_type = other DNA

SEQ ID NO: 2069 - DNA, 1001 bp, Homo sapiens
  source 1..1001: mol_type = other DNA
tgagcaggtgcagcccacgctgtcaggaatgccctgagagcctggcaacactcccgggactcaagaaggcaggtgggataagagctacaagagaggtgctaatggtaccactgttatcatcaaagagggtagagtagatttcccctcactgcgcatctgggacaccttactggaggaggtggcatttgagctcgttttgatgagatagcatatattttaatcaaatcatgtgtacctgaatcaggtaacttatattttgatattatgaatcaggtaacttatattttgatattatgatccctccaggaaaataaaaactagaagatggtaatagctcacatttatggaaggcgacctatacagcaagcttttcacatcatgtcctacgtatctcatgaggatgctgagatgctcaggggctctgaaacatacccgagggttcacagtgagagggtggcagagttggaatttgaatcctggtaggtttgttcccaaagagamcctggcatattggattataggggctattcctgcctgacagatcggacaggtagtggaaggagaaatgcagctcagagccccatttaggaggctggttgactgcatcataagacaccctctgctgaggcttgaaatgcattgttcaaaacagtttacagccaattttggtttgcctctgatagaaggagctgaacacaattttgattatttgctttaattcaaatcaggttaacaaaatcagtatattagtgcaatttaaggacctttttccccctttattacataagctagtggacttcccatctgatgtatgaaatgtcactttgtctttaattcttgacgttcacaaacactggtgctactggaaaaggagtgggagtgagcgtatgtgtgtgtgtgtgtgtgtgtgcatgtgcatgtatgtatatacacatatatatgagagtgaaaaccaaactgaggtttcagatggactttagaaggattgagcaggttttgaa

SEQ ID NO: 2070 - DNA, 1001 bp, Homo sapiens
  source 1..1001: mol_type = other DNA
aaagatctccagattgcttgtcccgcaaattcctagcatcctcctgtactattggatggactgttaggaagttgacttgtattacaaatgcatactgataatttttttttaaagttgaaatgttgatgtgactacctgaaaagagatctttggctgggtacagtggctcatgcctgtagtcccagcactttgtggggtcaaggcaggcagatcacttgaggtcaggagttcgagaccagcctggccaacatggtgaaaccctgtctctacctaaaatatttttaaaaattagctgagtgttatggtgcacatctgtaatcccagctactcaggaggctgaggcaggagaatcccttgaacccaggagggggaggctgcagtaagccgagatcgtgccacagttgcactccagcctgggtgacagagcaagactacatctcaaaaaaaaaagagagagagatcttgggaatcagataggtgcaattcctaccaccattaaaktcagagtaaaactgaagtatatttattagtcatttctacctcttatatacaaatatgtctggcagttgtgacttgattttgtttcttttctcctaagaaactcttttactcactcgctagtatcattaagaggtatgaatcaacatcgaaattaccagacttttaaaatagccctctttttttaaaaaaaagttgacgttctatttttgtttaaatatcccttttgatgtgctaactaggttagtctatcacctttaatgaaaacttgaatttctaaaggtgcatttctaaagccaagaaaacaagtaggttatgacaaacaaacaaacagtggaagtgatgctatgcatcaactgttctccagagaagtatcaataaattgcttgtagttatacaaatgcagatgcatacattagagatttccaaaatacaaaataattaagcttgatgaagactgatattatatatggcaaagggaaatatttaggcagtgtcatctt

SEQ ID NO: 2071 - DNA, 1001 bp, Homo sapiens
  source 1..1001: mol_type = other DNA
ttctttcttatttatttgtacattatctgtttgtatccttgaattttctctgggatgttataaaagaaaaatattacaagcataatttctgacacaatgttttataactgttttcaaaagcaatctatttctctcttaatttctatagaacccattttagtcattcctatgatgaatgaaaaaaaactcacaattagttgtcagtttcagaaaggagtctcagaagcatcttagaaccacctaggcggtcttataggcgtcacagaaaaatattccaccttacttattcttatcttcttcaaactgactccaaatataataagcaggcttaagttatataaggttccttaaaagttgttctcaaaaacaattaaatgcagactgtcctcagtaaaacttgcattggcccagtccattttaccaagtttgctccttcttacatgtacgactgcccctgtgacaagtttaagcctacgttaattaatcatctttccataacaytgagacatattcatccaaccctgagagggataaggggtaacaggcaagatatattcaaattgtgacatttaaggtcaacttgactttaaaactcatatactgctcagttttcatatacgtggctgaaaacaagtcatcacagagaactggtcacactgttagaggaccaaaatagtaaaatatgaacaattcttccatatttaatgatattaaatataacaggtcctatgtctatgcaattgaagtcaacatgtcactaattagggcttcctttgttatcaaacttgctgagaagatagaacagtgaggaaaaaatagcaggaattgagctgtacagaattaaagacattcttatgaaccttaagacttaaggtcagtcacactcatatgacatttggactattagacaactcttctgacctcaaattttgctcttaccagttggtgataatcctttggtaagagagcatgttaaaagtaaccaaatcagataaggacta

SEQ ID NO: 2072 - DNA, 1001 bp, Homo sapiens
  source 1..1001: mol_type = other DNA
ttctgagcactcacattttaatgctgggaattttatgctgaggttcagtgcttttcagggagccatgaaccccctgcaatgacttgcagactgtaggtattacatgtaaaacttgtgtgagtaatttcctgaagaaggggtttcattcttcagatcctcaaaaagatctatgatccggccaggcgcggtggctcatgcctgtaatcccagcactttgggagaccaaggcgggcatatcaggaggtcaggagatcaataccatcctcgctaacacagtgaaatcccatctctactaaaaatacaaaaaattagctgggtgtggtggcgcatgcctgtaatcccagctactcgagaggccgaggcaggacaacagcttgaacccaggaggcggaggttgcagtgagccaacagagtgaaactctgtctcaaaaaaaaaaaaaatatatatatatatatatgatcctaaaaagacattgatattaaagagtaatgatggggaargaccaccaagtgatcatttataagatgctgcgagaattgctaaagttgagggatggattctgcattccaggagaacaaaggaggtagatcccgattaactgagtagcaggatattgagggaagcttcttgtaatgattcagctgagtcttacacaatgaatgagacttggatagatgaacatgcattaggagacatcagttctggtcagaggaaacagcaaatgcaaaggcccagagccataagagattcagatgcactaaagaaatatcccatcatttaggatggtcggcatatacacagagggcctataaggaaggagaagaaactgaggttgtagaagctggtagggactgcatgctgaaaggcattgtaaatcttagactaaaatctgtgggagactttgaacaacctaaagattttaagcagagtgatgcaatgcatttgtcttttgaatgcaaatattgctggggcgggtcttttgtgttatcagctaatgatt

SEQ ID NO: 2073 - DNA, 1001 bp, Homo sapiens
  source 1..1001: mol_type = other DNA
tgtaaacttattagtgcctctgcacaccatataattaagatcaaattctccaagggtttaaaatagggactgctgctattgtgctgctgacagcgctaaggaacagatatttgccttttttacatagacggctctgccccgcttttgctgaaattcccactctcacagggctgggagcccagcagggtttacctggaccaatgaggggggctcactctgctgggaaatttgcttttatagatggcaccaccaacgctgaaaacatggaagtggaggcaaacgttccagagcatctactgtcgcatcccctagaaggggactgtggtcaaggcagatcagtagacagaaggctggaagggaaatgagccccaaggaagaggctcagatccagagcctgtgtcttggtgagactccaacagaagtgcctcgaggctggtgcttcagaaggaagtgggtgtacagctgtgtaagtgatctgggtcatgaataaacaaatgaacmcaggaatgcatgcaccatgagagcctggaggggactataagacagacaacgggtgatctgggcacaggtatcaactgctgaacgcccagtgtgtgcgtggaggaggaagggggtcagaaaggcaaggaggatgtaccagtatggtagagacgagcaactgtgggcaaggggtgctcaggatgcatgggggtgtggagagaaggggagagcaagaaaggcttccaggggtgaggagccaaggaggtcctgaagacagctaggagttagcaggcagaggaaggggatgggcatcccagggagaaggaacggcaagaacaaagcagcacagccgtggagagcctgtcagtgagcggagagcccgtcagtgagcagctcgcctgggttccagggaacagggccagaatttttggcaggatagactcaaaggcctgaggtgaacctgcaaacaaaggtaaaaacactaactggttttaagcaggagagaaatatgatcagatttc

SEQ ID NO: 2074 - DNA, 1001 bp, Homo sapiens
  source 1..1001: mol_type = other DNA
tcactgcaacctccacctcccaggttcaagcgattctcctgcctcggcctcccgagtagctgggattactggcatgcacatcatgcctggcaaatttttgtatttttagtaaagacagggtttcactatgttagctaggctggtcttgaacttctgacctcaagtgaaccgcccacctcggcctcccaaagtgctgggattacaggcatgagccaccgtgcctggccaggggatgatctctttctagaaattcatatccttcaattctggaaatgtttctcatgatagttctttgataactgaccctccttccttcactgtatttctctttctgggacttttactagtcagtgtatttctgggttggtctctctcttttctcttttattggcaaccctgatctaaggaactaaggtatagaggtggttgagtcctgaccagagccgtgagggtctagatttatgtaaatgatggagccatacacgttactttatttatagyaagatattgtaaagattttgaaatgtcatttatatgaaatgtcaagattattaaattcgtagttcactgtaacctcaaactcctgggctcaagcaatcctcccacctcagcctccaaagtagctgggactacaggcacatcccaccatgcccagctaatttttgtattttttgtagagacggggtttcaccatgttgcctagccttgtctcgaactcctggactcaagcaatcctcctgccttgacctcccaaagtgtggggattacaggcactgagccactgcacctggtcaatgcatttttaaatatggtctaagggtatcagcaagttgcagatttgataacagctgggtcttttcatttagtaaccacccttttttcctcctctgtactctcacacaatattaaaatacctcctattaaatctctattatcctcttctcttcctgttgcatttttctcccacaacttaaggctcaagtctaagcagtgaaaacata

SEQ ID NO: 2075 - DNA, 1001 bp, Homo sapiens
  source 1..1001: mol_type = other DNA
ataaattaaaataacagataacatgggctgtttttgacaggaatatattttagcttctgataattagctttagtaatcattagcttagttaatgaaaaataaaatacttataatattaaaaatatgagaagctaaactatgagcaactaacaaatcaaaaccacgttcttctgaattcctgactcccccgcaaatagttccaaatcactatagtattcacatagccctataataacctttgtggataaacagtgaattccatgttcaatgtaaaataacacagaaatttagagttttaattgcaatgtcctatgtaaactttaaaagtttccaaagcaattttcataaatgggattccattttccacagccaaaatactatactgacactgaccctcatgaactgttacctatgcatttgtgtgccatttacttttaattacaaaatttctccccttgattaaatttattgtatgccttgcaatatatcaaaatgatagawtaaatgtataaataaattattatttataacaaaattgaagcttgtccttggaatcattttcttgtagttccatgtagctaaaatggggctttgatttcaaccttgcccctgatgagctgtgtgatgaaatcttaggcaagttactcaacctaagcctcagtttcctcatctgcaaatcagggaaaataatacatgctttagactattattttgagaattaaatgaaatcatgtatacaaattgtcaaacagggcacagcatactcagtaccttatcattgtttagtgttgttattttgtatctacagtgtttttggaaaatagcatgattaatcaattgactggaagacacacagtctaacagacaatatatagaccatttatattggccatgaaagtgtccataatggctgacttaactggctttaatgtgtaaaatatggtgactcccatggtttttaagatatggcttaaagtagatatcaatttctttacattggt

SEQ ID NO: 2076 - DNA, 1001 bp, Homo sapiens; identical to SEQ ID NO: 2005
  source 1..1001: mol_type = other DNA

SEQ ID NO: 2077 - DNA, 1001 bp, Homo sapiens; identical to SEQ ID NO: 2006
  source 1..1001: mol_type = other DNA

SEQ ID NO: 2078 - DNA, 1001 bp, Homo sapiens
  source 1..1001: mol_type = other DNA
ggcaattccagtgaaataattgtttgtttgtttgttgagacagggtctccttctgtcgtccaggctggagttcagtggtatgatcttggcccactgcaacctccacctcctgggctcaagccatcctcccacctcagcctcccgagtagccgggactacaggtgcacaccaccacgcccggctaatttttgtattttttgtagaggcggggtttcccagcgttgcccaggctggtcttgaacccctgagctcaagtgatctgcccaccttggcctcccaaagtgctgggattacaggtgtgagccaccgcgcccggcctgaaacaatcgtttctaaatattggtgtgggccacacagtcatgtttggacctacttgtggccttttacagaccccaggccaaggctttgggaacttggctgtcagcctcctgtgccttctgcacccccaccccatttctgctttctggaacccccgatcctgtcctgttctgtggtgattcrggtgtgcttgggctctaggagaagatgtgtgaagaatcggcatcctttgacctgactccccatgacctggcttcaggactggacgtcatagaccaggtgctggaggagcagaccaaggcagcgcagcagggtgagccccacccggagttcagcgcggactcccccagcccaggtgcgttcatagccagactgcttggtcctgaggcctgcgctgctgcagggtgagccccacccggagttcagcacggactcccccagcccaggtgcgttcatagccaggctgcttggtcctgaggcccgtgctactgcagtgggcagcctgccctgtggctgtgtgtggtcggcctgggcaccatctattcaggctggcactgcagggcatccgcttctctcagaggcttcttgggtgtgaattcttcagggtcctgtagcctgtggaagggctggtattgttcagtagttctggtattttccaaagacctatgtcttctcccagccag

SEQ ID NO: 2079 - DNA, 1001 bp, Homo sapiens
  source 1..1001: mol_type = other DNA
gttggtggatttggcctgcacggattctgtgtggcctcttccttcccctgttggtggatttggcctgcacggattctgtgtggcctcttccttcccctgttggtggatttggcctgcacggattctgtgtggcctcttccttcccctgttggtggatttggcctgcacggattctgtgtggcctcttccttcccctgttggtggatttggcctgcacggattctgtgtggcctcttccttcccctgttggtggatttggcctgcacggattctgtgtggcctcttccttcccatgttggtggatttggcctgcatggattctgtgtggcctcttcctttccatgttggtgtccttttttccatgccaggaatcctggttctcaagggcggggttgttggcacgagcgtgatgcagactgcctttgctgcctttctcttgcccagggctgaacatggagctggaagacattgcaaagctgaagagtaagtgttgccctcccygcctccttgcagctgggtggggcctcctccttgcgaggaggtgggtgacacctcctcgacccacagtgatcctgctgcgcctggagggggccatcgatgctgttgagctgcctggagacgacagcggtgtcaccaagccagggaggtgagaggcggggagccagccccttcactgcaggcccagcctagagctagaaacgggccatggtgcagtcctgggctgtcacatcacgagtgaggcctgttttcaggcctgttttccctttttgagacctgggaggagcacctgctttgcatgatctggttgctgagatgttgagaggagcagcacacactcccacgggacagcacacagccccccacggaacggcacacacacccatggaacagcacacacactcccacgaacagcacacacactcccacgaacagcacacacactcccacggaacagcacacacacccacggaacggcacacacacccacggaacagcacaca

SEQ ID NO: 2080 - DNA, 1001 bp, Homo sapiens
  source 1..1001: mol_type = other DNA
aaaaaaaatccacatcctaactcctggaacctatgaatatgttagattacatggcaaaaaggacttaaggctgtggatggcattaaggttgctaattagttgcccttaaagtagggagactatcctggactgtggaagtgagccctggattatgaatgtgatagggaagcagaagcatagagaaactatgttaccaggtttgaaggtgcaggaaggagctattaaccaaggaatatgggcagctctagaagctggaaaagcaatggaataattccttcctagagcctccagaaaggcacacagccctgccacaccttgatcttagaccaaggaaacctgtgtcagacttctatcctacaaaactgtaagatagaattgcgggttgtttagggtgctatttagggtaacttgtgacagcagcaacagaaaagtaatgcactttctcaactttcctctctcccttctcccccagaaccaaacactgctggctctgggctctcrcagaacactgtccttacagtatttaatgctcttgatactatctggggcctggccacgtgcatcccatccttcccttagcttctccaggagcattgtggcttggtgtcacgacctatctgaaagccttaaccctgccaccacccactttctgctggaaggacaggcactgtgaagtgaaaggacccacagcccatgaactggaaggaacaggaagggcaggagaaagaagaaataagaggagagcagcagggggatgcagggaggaggaggataaaggggttaccagaggagaggaggtgagaaaacagagggaaggaatgaaggaggaagacagggtcaaagaagaggagaaggaaggaagggcgctggaggaggacacagaagctagggtggcaacgaagaggagaagggagaatgaagagaaaggaccttgttctgcccccacccatctcccacctgaacaccctctcctccctcctccctgagatctcccccagcct

SEQ ID NO: 2081 - DNA, 1001 bp, Homo sapiens
  source 1..1001: mol_type = other DNA
aggaaatttcatagaaaaggaagggaaacagtgacactctccagttttggcctgagcatataaaattatttgcctctgaagccctgagatcctaggccaaaataaaacaaaacaaataaaattaaacatcacgataacttcaaagccttcgtttctacataagcaggaactgaggaggaaactgaagcattgggctgcctaggtatatgatcattgcaatgtctctaggtggatggatgagtgcctggggagcagcatagactgatctcttgcttctacttctaaatcatggacttcccctatcatctacctaacaatgttggaccctgcaatttcaacctgtgaattttgtgatacttattatatgcagttttcaagctctctttagtttgctttttcttaggtggagaaaagactcattcaagttgatgttgatagtggatatcaccccatcagatactatgatcataagattagagcttggagagccccaaagagtayctggtcttctttttcaagctgaggatacagaaagcccagaaaaaaacatgatttgctgaaggttacctacatagtgagtaaatgcatgagaatgagaagccaggtattttgctttctgtgatcactcttatcagaggaaattcttatggttgcacttatgacagctgcattaagagtctgtacaatggaaagctttggaggagctgttaaacatatggagtctaaggaaatgagagtcagagagacggcttcaacttatcccttatctataacttggcagtagagctttcaagagctccaaccgccaaagctatggtttgctttctgaattgctgaaaccacagtgaaaaaggagaaataacaggagtgtacagatttttctgtgttctttggctttcacatttatctggtccaataaattcaacaggtatttcactgcaagttgaagttgaatgataatgtacaactatgaggtatattttctcagccatttctctgaa

SEQ ID NO: 2082 - DNA, 1001 bp, Homo sapiens
  source 1..1001: mol_type = other DNA
ctccactgtagctcaagtgtcaatgcttaatactgcttgattttcctgaatgatttctctatcccccaaagtaaaatgtgtaatttccctttttccgactccaatgttcctgcacttactgccaacataccactttaaaatactctaacatctgatttttttatttcccattacatatctattacatatctcttgaagacaagaaatcatttgtatttttatatcttgttttcaatatttaaatgacacatgctatttccattcccaaattaattgataaatacatgaataaataaaatagctgtgccatatagttatccttgatatcactctagatgaggaaactgaggctggaaagattaaacagcttaagtaatattaacaaagcaaataactcttgggacctccttgctctgtgtatgtcaaagctcatgctctctttcaactccattacatctctttgaatcagatagtaagatgaaacctcttctaggaagtaargacttcctggccccaatcaattctttttacttgccacctgcttgtgaatattaatattgctttcgctggattttaaaaagtagactcctaggtaaacagcaaacaagagaggcagaggccagaatgctcagaaaaaaggatacaaactggcgcaataaggattatatggtctgaagcagaggtatgtggaagctgaggtgggaaagtgatggtaaagcaaaccagacccaaggatattggtttatcttatggcaatacttaacccatggaatgagaacatttgtatgaattatccatgccattgttttcctccatataagatatcatatttcccatacgtggtttggagagacttcctggagtagatcgattccaagtgtatcttgaatggtagggaaaatatggcttagtgtttggaaaaagggatctaatttgcagacttcaaggccagtgagattgaaggagctgattcaaataaaaaataggcatacttgaagcaa

SEQ ID NO: 2083 - DNA, 1001 bp, Homo sapiens
  source 1..1001: mol_type = other DNA
ttagcttctgcttgagcatttctactcactggagttcattactttctgaaactgtttcctgttgaacagctttaatggttagaaatttctttgttatactgatcccaggcatgcatcacggtgatttctaataattgacaaaattattccccagttttcttaatctcttctctacctgacctggttcatagtaatatatttatattcctcaatatgcattctactatagcaatatttattttttcattctcattggagaattgtggataatgtattgacttcagaaaatatacatgtgtaatcagtatacaggtagactactgtgagggccaccttagagggctgtttttggaagctcaggatccaataaatctaacacccaagacccatgattagctcttcatgggtagttgaggtctttcaggggggtttatttttggttagttacctatcttaatctttttggttcatatctcttatggggagagaggtagggagggrcatggaaaatatcctatcaaacctccatttataattgtgctcactatcttataaataagacaagtaaatttttctaaaacttcggaagttttcttgataattatatagtcatttaaggattaatgaattctctaaagtttagccagttatccatattaatggtagctaaaaattgagaatgccacaaaaatttcagacatctgactttttaaaaattagaattttttggcagggtgtggtggcctgtaatcccagcaccttgggaggccgaggcaggcagatcacttgaagtcaggagttccagaccagcctggccaacatggtgaaactttgctctactaaaaaatacaaaaattagctgggcctgatggtgcacacttataatcccagctacttgggaggctgaggcaggagaattgcttcaatttgggaggcagaggttgcagtgagccaagatggtgctactgcactccagcctgggtgacttgtgactgggcaac

SEQ ID NO: 2084 - DNA, 1001 bp, Homo sapiens
  source 1..1001: mol_type = other DNA
ttttccatcaggctcagaaagcagagtgacataaaagctgggtatgtgctaaggaggagggggagggaaagtctccaaataaatcatttaactcacagagtttaagactggaagattctcctgggccttgtaagctataaaaaaaagcagatctctgtcaagaggccttttctctaaagcagttctgactcagcctatttgcccttggaagatgctgcagcacctaagacatccacaggccatcagtcaacacgtgatctcctctctagctatgctccctctagaaatgcaggatcttttgccccatcctaaactcagaaaaggggtttcatgtgcagaacatggtggagaatcctaggtctctgactcacaaaaggatcaccttgggcctgagcttcctcatctatgaaatggggatgggaattcatgccttgctgtataattgcaaggattctatggagtaataaaggtaagcgtctggcatggtttctgtacatctcrggtgctcctggtactggctgtcacacaggtcaataaatatcatttcctcctaatctttccacatgcatagttattggaaagctgggtgggcagcaggctataatttttattttgcccaaaaaggcaggaccttattttgtttatagaaggcagaacctctttgttctgcttgaaacaaacaaacaaacaaaaaacctctccaaaggctcttttcatcctctgctaaattggacaatccagtcggtccctctggagtggactcagttgattgcctacccagcacccatttctccccaactccctacctcctttttatttctcctgctttatagaactctgatttcatacagatatattcatgttcctccctggccatgtgcctcaaggaaggtaatcccactccagctccagggggttttctgattggtctaagacttggttctcaatctcagagctattgatattttgggttggatttttttttattttttatttttatt

SEQ ID NO: 2085 - DNA, 1001 bp, Homo sapiens
  source 1..1001: mol_type = other DNA
ctatctggtggaatttgaaatatttgtgtgatccaggcacctatctttaaaaaggatggagtacttgaccttccatccttgtcccatggcccttcttcctttgcttgttcagtcaagccaaatcccaccacgtctctatcattgtaaaacttttcagggagaaaacctcaatggaaccagggaaagcatacctaccaggtcttttacttttactttttttttttaaggttgagttccacacactgttggtggcacctaaaaaaccactgccaccagttgaaaagttaattatggattaccccttgaaataaaatacaagttttattagaagtggagggataaatcaaaacagctggagggggaatgccatgaaactgctatgacgaagcccatgatgttctacttagagtaaacattctttttattttattttttttaagtcctgggtctgctgtgtagaaagtcatcatcgctttcatgtgggacaaaagaggatttggmaagggaatttccttaaatctgtgcattgaaaatgcagcttatgggagcctaaagaaaatacgttttgctttttcttacagtgggtgcctcttaattgtgacttttataaaccccttctgtagctatcataaccatccaattatctaacttcattttcgtatgattaaaagagcctctcttgccgaacatatgacaattattagaacgtttctaaaatctttttttctagtgatatgaaactcctgtagataaaataagtcttgatttatacaatcctcaagtacatgtgaatgttatgtctataaataaatactccatagtagatgcaaaatccctttataagtaacaatacattggcatattcattgaccaaaaagccttgtgatgttaatgttaacaaaattaaacttcagccatttcattcaactagtaattcctgagttctaaggactaggcactatgctaggcagggaagctatatatgtatgtgtgtctgtgcc

SEQ ID NO: 2086 - DNA, 1001 bp, Homo sapiens
  source 1..1001: mol_type = other DNA
accatccatggtgagcggctctaactttcaatctggccagatcattttccccttgtattaaaattgtcctggaaaaccattaggttgattttcaatcatcacagctaatacattccttgttgcaaatgccaagtattctgcacttgcttcagtttttcagatcttctctctcatattcagtacctggggtgaaatccatgcctagtaaaacagcccttttgtatccaggccaggatgcatctctgagacttgaatgcttttgctttctctcctgttttttgttttgttttgttttgttttgttttggttttgttttgttttgtttctcttctctgcctgatcaatactttcccatctgaagaagcaaaacattctctctcttctgtttcccttgctgctgattctggctcaaggggatgggggcaggagtggaggaaagagggtcagagtctatatttaaccacaaagataattcctccttgacagcagctccagagagartttgacatttgaggggactgagtagcaagagtaatttgcatttatctggctatagaaacagaagagattgggagcaacaagtgatctgtggaggtaaaaatgagtcaggggtttggaagagggaatatagggcaggtgaagaagaagaaattatttgccaacaatgatggaaggataaagaacaagactcctgaaactatttccttaaatgtcacactaaagcaactccaagaggattgtaatagctttggagtgggacaagtggcacagatgggaaggctgacatgtcccggctgcttaaatactctgaattctagatctgcatttatcaaaatttaatgtacacccgaattgccctggatcttgaataaaatgcatatattaattcagtaggttggggtgggccccaagattttgtatttttagcaagcttccaaatgaagctgatgttggtcctgggaccacactttgattagcaaagctctgctagagcgttttgg

SEQ ID NO: 2087 - DNA, 1001 bp, Homo sapiens
  source 1..1001: mol_type = other DNA
atattctttcctgtctgctgccttgtaagacgtgactttcgctttctgccatgattgtgaggcctccgtagccatgtggaactgtgagtccattaaacttctttttgtttataaattactcagtctcatgtatgtctttatcagcagcataaaaacagactaacataacccccctttcttcctacccctgtgatttgggtggatattaaaattttgcaagccgccactctagagaagtaccactcaaaccatggtctgcagactaccagcattagcaaggcctgggagtttgtgagagatgcagattcttggtgcccatccaaacctacagaagcagaatctctggtggcaggaaccagcaatctgtgctttcaacaagctctctgagtgcttcttctgaatgttaaagtataagaacctctgctgcacagggagacctcactttcattattctcatttcacagatgagaaaaatgagtcagtaggaggaaaagtgattgmctcaagtgcttaataagtgtctaagctaggatttgaccctagggcttgtgaatctggagcccatagactcaactcctgtgctatactgcctctgtgtctttggtctgtgttctcttctttttttttttttcttaccaccctccaaaattcttatttatttattttctatcaccgtacttactggtggagtggaagtcccttggaagtgggggacgtgtctgatttgtgcatggctattttgcgatttgccattgctggaatatttagcaagcatcaatgagtcctggagggcttttaaaccatagatgatcagggcccctgcttggtctaggatggagcctgcaattttgcatttgtgacaagctcccacggatgctggtgctcacttggcatagcaaggggttatgctatttttcaaaggcaagagaagtgtgcatgtacttgagaggagaaggggtcggtcaccatttactttgtgcctcttgctacccttcgttgcc

SEQ ID NO: 2088 - DNA, 1001 bp, Homo sapiens; identical to SEQ ID NO: 2004
  source 1..1001: mol_type = other DNA

SEQ ID NO: 2089 - DNA, 1001 bp, Homo sapiens
  source 1..1001: mol_type = other DNA
cacgccgcacagctgccaccgccggccctggcccgggagaggggggtctctggggatcttagcaggccatggtgggggtgtcttggggccagcctgaactgaaagaccatcacagcttgcaagccacctccctgctctgttgctggctctccttgaagacaagtgtttttcaattaaccaaagcggtgcatggcaatgtgataggggaatgaaacacagcaacagaatcaatgccccacgctgggcaatagccgactttctgttcgctcccatcccttccttccctccccgcctccttcccctgctccttccattccacaaacatttattgagcacccgctgtgtgccagccactgttctaggccctgaagacacagaagtgaacaaaaaaaaagagtccctgtgcacatcctggagggactttccccgtgtgtgtgtgtgtgtgtgtgtgtgtgtgtctatacagtgtatggagacagtggataataaaagctgtttatsaggcactttctctgagctgttccatgtgcttcacttatactcattcagctaatcctcaggacacccccgtgaagtcagtgatattagtcacagaggcccagagaagtgaagtgacttgcccaaggtcacacagccagcaagaggccaagcccggattgaaccccagccgcctggctctggagcctgcagcataaccacagcagggaactgccaccggagacagacatcgacagccactaggagatgttaaccaacaggcttgtcttcacggcacggcccccgcttcaccagctgcactgtttgatgagctttgcaggtcccagatcttataagctcatggtgattgatccaaatgatgcagaggtcggcctaaagttagaagtgggcccctctctgccccaagacagcccttcaccccaattccattcccacagtttgggcatccacccaggctgccaagccaagcgggggctgcccgggttagcagggacctggccatg

SEQ ID NO: 2090 - DNA, 1001 bp, Homo sapiens
  source 1..1001: mol_type = other DNA
ggcagcaaattcccctcgtgactccaatgcccctgccatcttgggtctgggagcctttgcaccctgcacgccacaggctcgccacctcctcccgccagcccccaggatgccttccccacgtgggggcccttagtggccgggaccactttggtagcagtgcttaccccagccccccaaaccatcagtttctggggccagctccccatgaagcaagagccccaggagcagggacatctccttctctgatgtccctgcacctccaaggtctgggagacgctcatccctcttctctgtggcctctgcctgggaaagcttgggggctttgtaagtcaaaggttggtcttgtgggaacctcccagtgggctgtccctgagccctggagccacagaaacccctgccccacccacgatggctgtcatctgagtctgcatggaggtgtgtctgtgccaagtgagcacacatgcaccaaggcggcccctggccaccaggggctcttgaagyctgcaggcggcccttcctctctctcccactccccctgttggggccaccattctggctggcaagatggctgtgatggcctccagcaggccccctgcctccacccttagccccttcaagcatttccccagagccaccatctaaacgacagctgtgagaactcctctgtgcccccatttgtctcccacagtgcccatattcatcaccagcccacaaggcccctcctgtctatggaggcctcctcaggacatctgggggcttcctgggccagggtggggggtgcctgctccaggctgtttctggcttgtcccctccctgggtgctgcctaagcagcggcctctgtgtcctttccttggaccctcagcacccctgcatctaacctacccccaccccgagcttgcctcaagacccagcatggacagggccgcctacctgaaggtgtgggtggcggagggctaagacatttgggagggctatgacattccgggacctttaaattctt

SEQ ID NO: 2091 - DNA, 1001 bp, Homo sapiens
  source 1..1001: mol_type = other DNA
atatattgatcagttgatgaaaatgttgtgaccagggctctcaggaacttaaccatatgtttccctggagtgatggttcagaatttgttaattcagtgtcccaagtgagtttatagaataaccaccacgaataatgagaagcaacggcacaaactttgtgtacacaggcattttttgagagagagagagagctataatatttatcaaattctcaagggggtaactgaaaaatgttcaaccattacttcagaacttctattatgagacaaatagtgctggtcctcttgagaaaccaagggagtgggctcagctcagtgactgtctggatcagcccagaaacaatgtaggctgccatcttgatctgtgcttttccccagggacatgagcaagggcacttctaggccaagcaaaatcaatcgtgtttcatagatttggatttagagggcgctctaaaccagctcagaggaatggtatgttttagaatcctagggaaattgagtwctccaatcatcacttcagtcagctaggaaagatacacttttggcagggtgcggtggctcacgcctgtaatcccagcactttgggaggtcgatcacaaggtccggagttcaagaccagcctggccaatatggtgaaaccctgtctctactaaaaaatacaaaaattagccaggtgtagtggcatgtgcttgtagtcccagctacttgggaggctgaggcaggagagtcgctggaaccagggaggcggagttgcagtgagccgagattgtgccacactccagcctgggcaacagagcgagactctgtctcaaaaaaataaataaataaaaaagatatccttttaataaagaaaaaaaaacaacacataaaacttaagagtgtaataatagctgctgttcattgaatgcttaccaggaactagtatgatcataaggaactcttacaatcaccctgagagggagggcatggcaagccctaattaatggatgaagaaactaaggc

SEQ ID NO: 2092 - DNA, 1001 bp, Homo sapiens; identical to SEQ ID NO: 2009
  source 1..1001: mol_type = other DNA

SEQ ID NO: 2093 - DNA, 1001 bp, Homo sapiens; identical to SEQ ID NO: 2083
  source 1..1001: mol_type = other DNA

SEQ ID NO: 2094 - DNA, 1001 bp, Homo sapiens
  source 1..1001: mol_type = other DNA
cctctagaatccttattgctgttcccacattctgatcataaatttggataaattcactgctactcaggcttcaagctgatataatgaatagagggaaaataggcacccaaagtcaataagaagcacaggtgatgatgcccctgtgatttgtgggattgtaaaaatacattgtcttctgttttccctttttgcccaaatccaaatttagaagagaacattctgggaatgtatacgtaagaactgcaacatgaaggaacaaacaataaccatgataaagcaagcaggcaaacaaaaaacagccctgtgactataaccacaaagctgggcagcatataattctaatttaatagtagctggaaaaggcttctctctactctatagtcatggcccccatgctcaacatggaactcctatattttagcttttaagtcatcataaaatattaaggggcccatattctttgactccctaggtttccagaattacttggattttctgagsacattttcatttcttagtgacacatgcaatgtcaatagattttggaaaagtatttctcatgttccctatttacctacaaaattcttctatgcatcttttctccaagaaagatttaaggatgaagaaattactatgatacattaagaaaggccaaaggaagtatactctaatatataccacattatgtacttaggctaaaaaacgtttcattcctttgtgatattttcttccttctgtgtaagcaatttgtcatattttctaaaaccatgtttttaagatttttcttggctactctttaaacttatttacttctgaagtatgaaaaacacagttctcttagtttgagtgcaatgtgcacatacattagggaaagaacagcctattcaataaataattctgggaaaactgaatatcaacaagcagaaaaatgaagccagacccctctcaccatatgcaaaaatcaactcaaaatgaattaaagacttaaagcaagacccaaa

SEQ ID NO: 2095 - DNA, 1001 bp, Homo sapiens; identical to SEQ ID NO: 2071
  source 1..1001: mol_type = other DNA

SEQ ID NO: 2096 - DNA, 1001 bp, Homo sapiens; identical to SEQ ID NO: 2072
  source 1..1001: mol_type = other DNA

SEQ ID NO: 2097 - DNA, 1001 bp, Homo sapiens; identical to SEQ ID NO: 2087
  source 1..1001: mol_type = other DNA

SEQ ID NO: 2098 - DNA, 1001 bp, Homo sapiens
  source 1..1001: mol_type = other DNA
aaagctcagtcccagatcctcggccatgctcctgctgctcctggaggcacctctgactcctgggcagagagagcccccattaaatagaagaccagctctcacagtgggtgacttaatcactcagtctcctccttcccttttcctctcccctcccctcttcaagagcacactgtggccctaccctgctagagaatgcaccgcctacaacagaaaccaagtttggtttgaggaaaaaaaaaaaaaaaaaaaaaagaagaagaaggagaagaagaaagctttcccaagcatatttatatacagtatgctcatgtgctccttccttcgtttacagaaggaagttaggaaagtccctgaaggaggagagaaagaattcatcaagtcagtgggtggggcaaattaaaatatacctgttccctgcactggaggcttaccagctgtgccagtctggggagtgtgcttctggaagtgaaagtgagggatgagaggtgtgtggtttgcagrttgggaaacggaaatcacatttgcatcagctctttgcaaagtgctgcctagccctctgtcattttgaacctcatagaaattcattctcagtgtacagatgggaatagcaaagttctaaaaggtgaaggcacttgtcctaggtcatccaaggatgaagacagaggagctaggaagatgacctagttctaaatcacggcttggagttgtaacctctagcacatgactgcccatgaaaggaaagtatttccagtctgcattgaccattgtttaatcagagtatgaggccacagatcgaggtgactgtctgtgagggtagaacattaaccactactccctgattagtctaaagttaattgatcatgtgatgtgctttgcctgcagttgggtgtgggggccacaacatgtaataaaagattatatttattaagtgcttactttgtgccaatcactgctctaagttaaatacatcaataaaattattcaatcctgagataaatttt

SEQ ID NO: 2099 - DNA, 1001 bp, Homo sapiens
  source 1..1001: mol_type = other DNA
ctcagcactttgggaggcttaggcaggagcatcgcttgtgtccaggagcttgaatctagcctgggcaacacagtgaggccccatcgctacaaataatcaaaattagccaggcgaggtgcatgtgcctgtagtcccagatactcaggaggctgaggcaggagaattgctgtcctcctgcaccagaagcctccagttgctttgtgtctcagtggctcaccctattctggacactttgcataaacagagtcccacaggcttgtcctcaggtgtctggctctgtcactcgcataatggccttgaggttctccacgccgcagcgtgcgtcaggacagcggcctccttcctttttcaggctaattctcccctgcacgcatggatcacgtttggtgcatccgtccacccacgaggaacactcgggtggttcctaccttctggctgccatgaacattcacggacaggcatttgtttgagtccctgttctgaatcctctggcctatatcsctaggagagaactgctgggtcctgcagtgcttccacgctgagcttttcgaggaactgccacaacgttccccatggcagctgcgcccttctgcttttccgccacgatgcacaaagctaacaatgcctctggtctctgtgtgcagtgcccttcagagagccgtcctcaccggcaaacaagcagcggcatccccctgggagcttgttctgaatgcccggcgcgtctccaaacacacttggagaaaccacctggacggtgctcaaccttgaacctctgaagcttttagacactgtcccgatgccaggtgccagcccagagcttcaggtgcaatgggtctgggcatgggggctttcataggctgcccagatgaccccactgtgtggccggggttgagacgacagccctgggagaagcttctgctgccacctgggctgctctgcggggagtatgctggctggaaggcagttatcagaggctgctttgggagcagcccctcatcccg

SEQ ID NO: 2100 - DNA, 1001 bp, Homo sapiens
  source 1..1001: mol_type = other DNA
agacacacttcgtgacctcactaggatttgctttacaagataagattttcctggcaagcattgaagttagtgcccagattcaaaacagcaaacttaaaactattatcttcatgcttgctataatcaggtgtaccgcccaacttcccatccctacctccccttccctagtaatccagaggtactcaaggtcactactggctacttaaggtttacatccactcccaaggaaacaccagcaaccaaaagaatacttcccagatggaaaacccgtcatttgaccttggaatgctctgcctcccataatgaccaaaataaggtccggccagaggggcttacgttttttggtaaggaacaacacattgttttagagagataatctgacataactctgctaagctctgagtgtctatgcatggtaccacagcaaacaccctatgtcccaaatggaaactagcagggtgaaaaaattgttcatctaagatgacattaatctctgtatgmctccttggtacagttcttttccacaacatgcagcttaagattcaacaattttttcattgtgttttgtgtttcctgaagcattcctccagctacctgaagctctcactgattaaaatagacctcctttactaaaaggggtaaactgaggcacagaagaacaaagcaatgtgccttatagttcagaataggtaaacaaaaattggacatctattattttcaaatctctttagattaaaagaaaaaaaaatgtatttctcaaagtccaaagtcaaccttctccaaagggaaactgcatgtctgtctagtaacctataggatcattcacacttttttttccttgagaaggaactaacttgccagcctaccaacaattttgccagtgccttggcatcaggcatatctgcacaacctttccagagcctatatcatagtgatctgttcaagctgctcaaagctcagtaatcatactaatctgtgcatagtgaccagtgctacctgct

SEQ ID NO: 2101 - DNA, 1001 bp, Homo sapiens
  source 1..1001: mol_type = other DNA
tccttattcctggctcttccagaggctggtggctcttagggctcagcagggctgctgcctgggacagggagaccaggggacccaggaagccctggctcagaggaactgcattctgcccgcaacaaagacggagtcaaacaagaactccggagtttgcagaagtgtttccctttaaggaaacgcttctatcctgtgcagcaacctaggtttagggtccaactgtctccaaaggaccacttgagaagcaagaaggagcctggtgaggctgctcccagtgccctgcggccagcagtccacacagccggagagcccatctctgagctgggcgccccatggcaaagcaccccctgaacttaccagctcgaaggctgctgaagagcaggaagagcagtccaggactggaaaaaacaaccagaaaggcaggtgaggcggggccaccagggagttacctgtatcttccaaacaggaacaggctggttcccatgagcaggaggtagttargcccatcacagaaatgtgaaggcagagccaggagcctgcctgcctctgttctccatgggaattcggggtccggggccaggaccaccaccctcctgcccagcacagcaagtccgaggggctggcagcctctcaccactctctagctctcgcggtaacaaatccccagaaacacagtgatgctggcgtgaggatgaaggggagcgagggacgccagtgaggctggtctagccttcctggggacagatgccaagaagttgtaggaaatcagaaaaaaaaaaaaaaaaaaaagctttcagggcacatatagtaggagtgtcacttaaaatgctggggagacggagaacatcaggcgtgcccgtgacagggtcaggtgagtgacgggacagccctgtgcggaacgcggatcattttgaaaccaaacctgagctcctcctgtttcagatcctgctgcagctggtgcccctgcctcgggcagcaaattcccctcgtgactccaatgc

SEQ ID NO: 2102 - DNA, 1001 bp, Homo sapiens
  source 1..1001: mol_type = other DNA
tctggctgccgacagtcaggttctgctgcagaagcacgttctctatgcagcagccaatgttcacgctgggggtccgtgcgatcctcagcacgctgaccacgtcatacaagccccgcatgttcaagaagacggtgtcattctgcagagcctggtccagcaggctgttgtccgtcttattgatccagtacacgttgggcctggggtagccgtttatggatgtacacgtgaaggtgagctcatcctgggaggggctgtggggggcgctgacgacgggcacgctgaagtttgctgcaggggagggaaacagattgtgagagatgccagaccctgctggtcaagaaacagagggtacacggtgccaaggctgggtcagaggggaggcggcccattgtgccccgacatgggtgacaggccaggaccagggctgtggtccgagcagcaggctccgccctgtcctgcccaagagtcatcccccaagccagtcccagtagccagggaccrctgagcctgtcgggcagtgactggcacccacagaccccccactccacagccgtcggctgtgccgggaccccctcatttggatctggtcattctcactgctgacacaggggctcacagtccatctgaaatggacacagctgttctccccaatgaactgcccagagctccttggttgcctcttatttttctcttaaattttgttctcatttagtgctttatagagttcccttcaaatttcacttttaaaactctagtttggatgtggtggctcacgcctgtaatcacagcactttgggagggtgaggcaggaggatcgcttgtgtccaggagtttgagaccagcctgggcaacatagtgagaccccatttctacaaataatcaaaattagccaggcgaggtggcatgtgcctgtagtcccagatactcaggaggctgaagcaggagaattgcttgagctcaggaggtcaaggctgcagcgtgatcacgctactgcactccag

SEQ ID NO: 2103 - DNA, 1001 bp, Homo sapiens
  source 1..1001: mol_type = other DNA
agaatttctcagcaattacattatattgctgctcacttgcagtaggaaagctgtcacaaatgtggcagacacagggtagctttactgtttgtgcagctacgtaaatgcctgtgggaaaatctttttttttgagatggagtcttgctccgtcacccaggctggggtgcaatggcgtgatctcagctcactgcaacccccgactctggggttcacgccattctcctgcctcaccctcccaagtagctgggattacaggtgcccgccaccatgcccagctaattttttgtatttttagtagagatcgggcttcactatgttggccagcctggtctcgaactcctgacctcaggtgatccacccgccttggcctcccaaagtcctgggattacaggagtgagccactgcacctggcacctgcaggaaaatctgtgtgtgtcccctgcccccaaagccctctgggctggaaggcttggcaaggtttcaggtttgtgctgcggtgcytcgtccttattcctggctcttccagaggctggtggctcttagggctcagcagggctgctgcctgggacagggagaccaggggacccaggaagccctggctcagaggaactgcattctgcccgcaacaaagacggagtcaaacaagaactccggagtttgcagaagtgtttccctttaaggaaacgcttctatcctgtgcagcaacctaggtttagggtccaactgtctccaaaggaccacttgagaagcaagaaggagcctggtgaggctgctcccagtgccctgcggccagcagtccacacagccggagagcccatctctgagctgggcgccccatggcaaagcaccccctgaacttaccagctcgaaggctgctgaagagcaggaagagcagtccaggactggaaaaaacaaccagaaaggcaggtgaggcggggccaccagggagttacctgtatcttccaaacaggaacaggctggttcccatgagcaggaggtag

SEQ ID NO: 2104 - DNA, 1001 bp, Homo sapiens
  source 1..1001: mol_type = other DNA
gctcccccaaagatatttacatcctaccctgtgaatatgctaccttacatggaaaaaggggctttaaaaatatgattgagttgagaatcttgagatggaaagttatccagtattatctgagtgggcccaatgtcctcacaagggtccttataaagtgagaaataagaggatcaaagtaagtagtaggtgatgtgacagcagaagcaagaggttggagtgatttaaggaagtgggagatcaggaagtgttaagcacaaagttaacttatacctttaaaaaaaaaggaaaattaaagacaacaagcagatatatacattatataaataaacacaagaacttgttaaacttgtgaaacacaggactacccaagacaaatgtttccctttccatttctactctaggctatatgaggaatctatttttctctttttcttagaactcttactctgcaggatcaaaatgtcaagcagtgaccacataagtgggaagtagatcaagacrtgcttataattacattcttgtggttggtataaaattctgtaccacagccattccttagaagccagctcatgggatcaaacagacaagcaagctcacttctcaagcccacgatgttacgtattagtccatattggtgagttcctttgtgcccaaacttagctgccgcacactacagtgataggaaactgccaacagttttttgtcaaacccactacagtggatcccacaatgggctgagacctcgtctagagtcatcaggttttccaggatgtgcagatggcctggaaacttggccaagaggtagggatcagcactctttagtaagctgtatatccaccaaatgctgtgacacaaggaatgggcctcaaaatgtttcaggccagcacagctttgtctttgcaagtcatttttcagtggcagttaaatattgtggcaaagccaaggtacagactcacgtgcattaaaatatgcttatgagtaataataccataagtatttcc

SEQ ID NO: 2105 - DNA, 1001 bp, Homo sapiens
  source 1..1001: mol_type = other DNA
ggggtcaggttgctggtcccagccttgcaccctgagctaggacaccagttcccctgaccctgttcttccctcctggctgcaggcacccccagccagaacacgcagtgccagccgtgccccccaggcaccttctcagccagcagctccagctcagagcagtgccagccccaccgcaactgcacggccctgggcctggccctcaatgtgccaggctcttcctcccatgacaccctgtgcaccagctgcactggcttccccctcagcaccagggtaccaggtgagccagaggcctgagggggcagcacactgcaggccaggcccacttgtgccctcactcctgcccctgcacgtgcatctagcctgaggcatgccagctggctctgggaaggggccacagtggatttgaggggtcaggggtccctccactagatccccaccaagtctgccctctcaggggtggctgagaatttggatctgagccagggcacagcctcccctggrgagctctgggaaagtgggcagcaatctcctaactgcccgaggggaaggtggctggctcctctgacacggggaaaccgaggcctgatggtaactctcctaactgcctgagaggaaggtggctgcctcctctgacatggggaaaccgaggcccaatgttaaccactgttgagaagtcacagggggaagtgacccccttaacatcaagtcaggtccggtccatctgcaggtcccaactcgccccttccgatggcccaggagccccaagcccttgcctgggcccccttgcctcttgcagccaaggtccgagtggccgctcctgccccctaggcctttgctccagctctctgaccgaaggctcctgccccttctccagtccccatcgttgcactgccctctccagcacggctcactgcacagggatttctctctcctgcaaaccccccgagtggggcccagaaagcagggtacctggcagcccccgccagtgtgtgtgggtgaaa

SEQ ID NO: 2106 - DNA, 1001 bp, Homo sapiens
  source 1..1001: mol_type = other DNA
cacaaaccatataagacattattgttcccattttacaggtggaaatctgaagctctgagaggtggaatgagttgcctgaatttaccagaatgtgggatttaccagaatgtttaccagaacgaatttaccagtcaggctttgaggccagatctgtctgatccaaaatcagtgctctttctgaaatgctgatgcaaaaggaagtcatcagaactctatagaccaaccctgcacatttgttaccttctccagaagtgctttcgttgctgatataccagacgtcttttgttaaaattaatctactaccatcaccgtatggggaataactctggctagcctaagaaaagcaaccttacataggtaaaaataattgcaccccttccatctgccaaaagagttctattgtcggtttcccaggcaatatatgtgctttgggaaatattgccattagacaatctgagtgtggttgcagtaaagtattctagaatgactggaatacccagmaaactgggtaagaatcatgtgttctgctgtcagcagaccttgtctgggcctggcaaactctgcctctggggttagcaaaactcccttacgctcccctctttcaaacaagagtgattatcagttgtcaaagttgttacttctgcagagaaggaaaagtggttctggacactgtccacagattgtttcctcctctggggcaagaggattgggagaggggtatgcacatgcttttctcaatttgtggtttttgcttgggtttgtggtttaaatccctaattttggcaatcatctctgccacagaccatccaatccatgcaggtgggttcattccatactctgtgaaatatattttgatgttagaggggtgggaatgtctgatttattgtttcatcctcgtctctggggaggggaagcaaagctagtagtagtttttttttcaagggcaatctcaggccattctagaatgcttcattgcagccacactctgattgcctaatggc

SEQ ID NO: 2107 - DNA, 1001 bp, Homo sapiens
  source 1..1001: mol_type = other DNA
gtgggaggatcacttgaggccaggagcttaaggctagcctgggcaacatagcgagaccccatctctacaaaaaataaaaaattagctgggcatggtggtatgtgcctgtggtcctagctacttgggaggctgaggtaggggcattgagcctaggagttcaaggctgcagtgagctataatcacaccactgcactccagcctgggtaacagagtgagaccctgtctcaaaaaaaagaaagaaaaagaaaaagaaaaggggtatttattgaacacctactatgtttcaggcactgtgctagatcctaagtgaatatcagcacatgaacaagacaaaggcgaaaagttaccaaacaagtctaagttgatttcggtatatgcatcttcctgacttctggtcccgtgctttgaccacaacccttcaccactagaccagacttccccaaataaacaactacttctgcatgctggggatgggctgtgtgcggcagcatttacgtaggyggtacagacagcagcctttcacttaatgttgcaataacaccaggctaaacaatgtgcactgacttcaaaagtgtggggtcaggtctccttcaagtgccacagggagagtgcaaagtaggaaaagtctatcggatgaggaaacactgtagagggaaagtgaattttttttcaatttgggttaaaattcagatgtggaattctaccctccttttcacttttggatccccagataggaggaactcagcacatagataatcatgaactacacacattttggttttatatgctcagacttgtccagagcatgaaatccctgccctgttggaaggcagcgccgtgctcacggaggcacacaagcacctgtctcaaagtcaccctgacctgcagatctgcaaatggcaaaaataatttcacatgtttgttctgatttgtcttcatttttaggctaccttgtgtgagctccactttttagaatgtgattttgcagtcctgaaatggat

SEQ ID NO: 2108 - DNA, 1001 bp, Homo sapiens
  source 1..1001: mol_type = other DNA
gacaggagctgggcagcagcaggaagacggggggcacccctcctggcgtcctggccgccgggacacccctctccgggagaggacactcggtgcccctccgtgaagccggtaacctcggctgcgccacctcccccacccgcgcgcccgcgccgggaaagccagcgtggccccagtctccgaatttctcggaatgaacaacagcaaattgaatccagggctccggcgggggccgcctttgctggccactggttctgcagcctggcgagactgcgcttagtccccgcctggagtgcctcccgaaggcctggctggaagctagactcagtccctttgtagtagcagcggtggagcagggaccagcgtcttggacgggtgacccagactcaattccgactttggccgagggcatgtttgacactgggtgtgaaatctagacagttcccgcggtcatagagatggggcagcagcattcaggcagggctcagaactgtccgggtcccrtcagtgttggggcggaagaggaagagtgtcaactgagccaggcatttatttattttattgttgtttgagacagggtgtcgctctgtcgcccaggctggagtgcagtgggcagcatctcagctactgcagcctccgcctcccgtgctcaagcgatcctcccacgtcagcctcccaagaaggtggtattattggccacgcctggccaatttttgtattttttgtagagaggaggtctcactgtgttgcccaggctgttcttgtactcctgagctccagcaatccacccgccttggcctctgaaagcgctgggattacaggcttgaggcaccgtgcccagctgagccaggcttttaaaaccggttctgtccctacccagagagcttcttacctggcggcctccttaacctctgacaccagctgaccacgcttatgagccaaacataaaaaccaaaagaaacccaggcttggtggctcacgcctgtaatcccagcactttggga

SEQ ID NO: 2109-3000 - skipped (892 entries)

SEQ ID NO: 3001 - protein, 10 aa, synthetic construct
  REGION 1..10: note = Description of Artificial Sequence: Synthetic peptide
GFDIQDTYMH

SEQ ID NO: 3002 - protein, 17 aa, synthetic construct
  REGION 1..17: note = Description of Artificial Sequence: Synthetic peptide
RIDPASGHTKYDPKFQV

SEQ ID NO: 3003 - protein, 17 aa, synthetic construct
  REGION 1..17: note = Description of Artificial Sequence: Synthetic peptide
RIEPASGHIKYDPKFQG

SEQ ID NO: 3004 - skipped

SEQ ID NO: 3005 - protein, 17 aa, synthetic construct
  REGION 1..17: note = Description of Artificial Sequence: Synthetic peptide
RIEPASGHIKYDPKFQV

SEQ ID NO: 3006 - protein, 7 aa, synthetic construct
  REGION 1..7: note = Description of Artificial Sequence: Synthetic peptide
SGGLPDV

SEQ ID NO: 3007 - skipped

SEQ ID NO: 3008 - protein, 7 aa, synthetic construct
  REGION 1..7: note = Description of Artificial Sequence: Synthetic peptide
SGGLPDW

SEQ ID NO: 3009 - skipped

SEQ ID NO: 3010 - protein, 10 aa, synthetic construct
  REGION 1..10: note = Description of Artificial Sequence: Synthetic peptide
RASSSVSYMY

SEQ ID NO: 3011 - protein, 7 aa, synthetic construct
  REGION 1..7: note = Description of Artificial Sequence: Synthetic peptide
ATSNLAS

SEQ ID NO: 3012 - protein, 9 aa, synthetic construct
  REGION 1..9: note = Description of Artificial Sequence: Synthetic peptide
QQWEGNPRT

SEQ ID NO: 3013 - protein, 9 aa, synthetic construct
  REGION 1..9: note = Description of Artificial Sequence: Synthetic peptide
QQWKGNPRT

SEQ ID NO: 3014-3115 - skipped (102 entries)

SEQ ID NO: 3116 - protein, 116 aa, synthetic construct; identical to SEQ ID NO: 116
  REGION 1..116: note = Description of Artificial Sequence: Synthetic polypeptide

SEQ ID NO: 3117-3120 - skipped (4 entries)

SEQ ID NO: 3121 - protein, 116 aa, synthetic construct; identical to SEQ ID NO: 121
  REGION 1..116: note = Description of Artificial Sequence: Synthetic polypeptide

SEQ ID NO: 3122 - protein, 116 aa, synthetic construct; identical to SEQ ID NO: 122
  REGION 1..116: note = Description of Artificial Sequence: Synthetic polypeptide

SEQ ID NO: 3123 - protein, 116 aa, synthetic construct; identical to SEQ ID NO: 123
  REGION 1..116: note = Description of Artificial Sequence: Synthetic polypeptide

SEQ ID NO: 3124 - protein, 116 aa, synthetic construct; identical to SEQ ID NO: 124
  REGION 1..116: note = Description of Artificial Sequence: Synthetic polypeptide

SEQ ID NO: 3125 - protein, 116 aa, synthetic construct; identical to SEQ ID NO: 125
  REGION 1..116: note = Description of Artificial Sequence: Synthetic polypeptide

SEQ ID NO: 3126-3127 - skipped (2 entries)

SEQ ID NO: 3128 - protein, 116 aa, synthetic construct; identical to SEQ ID NO: 128
  REGION 1..116: note = Description of Artificial Sequence: Synthetic polypeptide

SEQ ID NO: 3129 - protein, 116 aa, synthetic construct; identical to SEQ ID NO: 129
  REGION 1..116: note = Description of Artificial Sequence: Synthetic polypeptide

SEQ ID NO: 3130 - skipped

SEQ ID NO: 3131 - protein, 116 aa, synthetic construct; identical to SEQ ID NO: 131
  REGION 1..116: note = Description of Artificial Sequence: Synthetic polypeptide

SEQ ID NO: 3132 - skipped

SEQ ID NO: 3133 - protein, 116 aa, synthetic construct; identical to SEQ ID NO: 133
  REGION 1..116: note = Description of Artificial Sequence: Synthetic polypeptide

SEQ ID NO: 3134 - protein, 116 aa, synthetic construct; identical to SEQ ID NO: 134
  REGION 1..116: note = Description of Artificial Sequence: Synthetic polypeptide

SEQ ID NO: 3135 - skipped

SEQ ID NO: 3136 - protein, 116 aa, synthetic construct; identical to SEQ ID NO: 135
  REGION 1..116: note = Description of Artificial Sequence: Synthetic polypeptide

SEQ ID NO: 3137 - protein, 116 aa, synthetic construct; identical to SEQ ID NO: 137
  REGION 1..116: note = Description of Artificial Sequence: Synthetic polypeptide

SEQ ID NO: 3138 - protein, 116 aa, synthetic construct; identical to SEQ ID NO: 138
  REGION 1..116: note = Description of Artificial Sequence: Synthetic polypeptide

SEQ ID NO: 3139 - protein, 116 aa, synthetic construct; identical to SEQ ID NO: 139
  REGION 1..116: note = Description of Artificial Sequence: Synthetic polypeptide

SEQ ID NO: 3140-3150 - skipped (11 entries)

SEQ ID NO: 3151 - protein, 116 aa, synthetic construct; identical to SEQ ID NO: 151
  REGION 1..116: note = Description of Artificial Sequence: Synthetic polypeptide

SEQ ID NO: 3152 - protein, 116 aa, synthetic construct; identical to SEQ ID NO: 152
  REGION 1..116: note = Description of Artificial Sequence: Synthetic polypeptide

SEQ ID NO: 3153 - protein, 116 aa, synthetic construct; identical to SEQ ID NO: 153
  REGION 1..116: note = Description of Artificial Sequence: Synthetic polypeptide

SEQ ID NO: 3154 - protein, 116 aa, synthetic construct; identical to SEQ ID NO: 154
  REGION 1..116: note = Description of Artificial Sequence: Synthetic polypeptide

SEQ ID NO: 3155 - protein, 116 aa, synthetic construct; identical to SEQ ID NO: 155
  REGION 1..116: note = Description of Artificial Sequence: Synthetic polypeptide

SEQ ID NO: 3156 - protein, 116 aa, synthetic construct; identical to SEQ ID NO: 156
  REGION 1..116: note = Description of Artificial Sequence: Synthetic polypeptide

SEQ ID NO: 3157 - protein, 116 aa, synthetic construct; identical to SEQ ID NO: 157
  REGION 1..116: note = Description of Artificial Sequence: Synthetic polypeptide

SEQ ID NO: 3158 - protein, 116 aa, synthetic construct; identical to SEQ ID NO: 158
  REGION 1..116: note = Description of Artificial Sequence: Synthetic polypeptide

SEQ ID NO: 3159 - protein, 116 aa, synthetic construct; identical to SEQ ID NO: 159
  REGION 1..116: note = Description of Artificial Sequence: Synthetic polypeptide

SEQ ID NO: 3160 - protein, 116 aa, synthetic construct; identical to SEQ ID NO: 160
  REGION 1..116: note = Description of Artificial Sequence: Synthetic polypeptide

SEQ ID NO: 3161 - protein, 116 aa, synthetic construct; identical to SEQ ID NO: 161
  REGION 1..116: note = Description of Artificial Sequence: Synthetic polypeptide

SEQ ID NO: 3162 - protein, 116 aa, synthetic construct; identical to SEQ ID NO: 162
  REGION 1..116: note = Description of Artificial Sequence: Synthetic polypeptide

SEQ ID NO: 3163-3167 - skipped (5 entries)

SEQ ID NO: 3168 - protein, 116 aa, synthetic construct; identical to SEQ ID NO: 168
  REGION 1..116: note = Description of Artificial Sequence: Synthetic polypeptide

SEQ ID NO: 3169 - protein, 116 aa, synthetic construct; identical to SEQ ID NO: 169
  REGION 1..116: note = Description of Artificial Sequence: Synthetic polypeptide

SEQ ID NO: 3170-3201 - skipped (32 entries)

SEQ ID NO: 3202 - protein, 106 aa, synthetic construct; identical to SEQ ID NO: 202
  REGION 1..106: note = Description of Artificial Sequence: Synthetic polypeptide

SEQ ID NO: 3203 - skipped

SEQ ID NO: 3204 - protein, 106 aa, synthetic construct; identical to SEQ ID NO: 204
  REGION 1..106: note = Description of Artificial Sequence: Synthetic polypeptide

SEQ ID NO: 3205 - protein, 106 aa, synthetic construct; identical to SEQ ID NO: 205
  REGION 1..106: note = Description of Artificial Sequence: Synthetic polypeptide

SEQ ID NO: 3206 - protein, 106 aa, synthetic construct; identical to SEQ ID NO: 206
  REGION 1..106: note = Description of Artificial Sequence: Synthetic polypeptide

SEQ ID NO: 3207 - protein, 106 aa, synthetic construct; identical to SEQ ID NO: 207
  REGION 1..106: note = Description of Artificial Sequence: Synthetic polypeptide

SEQ ID NO: 3208 - protein, 106 aa, synthetic construct; identical to SEQ ID NO: 208
  REGION 1..106: note = Description of Artificial Sequence: Synthetic polypeptide

SEQ ID NO: 3209 - protein, 106 aa, synthetic construct; identical to SEQ ID NO: 209
  REGION 1..106: note = Description of Artificial Sequence: Synthetic polypeptide

SEQ ID NO: 3210-3215 - skipped (6 entries)

SEQ ID NO: 3216 - protein, 106 aa, synthetic construct; identical to SEQ ID NO: 216
  REGION 1..106: note = Description of Artificial Sequence: Synthetic polypeptide

SEQ ID NO: 3217 - protein, 106 aa, synthetic construct; identical to SEQ ID NO: 217
  REGION 1..106: note = Description of Artificial Sequence: Synthetic polypeptide

SEQ ID NO: 3218 - protein, 106 aa, synthetic construct; identical to SEQ ID NO: 218
  REGION 1..106: note = Description of Artificial Sequence: Synthetic polypeptide

SEQ ID NO: 3219 - protein, 106 aa, synthetic construct; identical to SEQ ID NO: 219
  REGION 1..106: note = Description of Artificial Sequence: Synthetic polypeptide

SEQ ID NO: 3220 - protein, 106 aa, synthetic construct; identical to SEQ ID NO: 220
  REGION 1..106: note = Description of Artificial Sequence: Synthetic polypeptide

SEQ ID NO: 3221-3318 - skipped (98 entries)

SEQ ID NO: 3319 - protein, 107 aa, synthetic construct [sequence omitted]

SEQ ID NO: 3320 - protein, 330 aa, synthetic construct [sequence omitted]

SEQ ID NO: 3321-20009 - skipped (16689 entries)

SEQ ID NO: 20010 - DNA, 1001 bp, Homo sapiens; identical to SEQ ID NO: 2069
  source 1..1001: mol_type = other DNA

SEQ ID NO: 20011 - DNA, 1001 bp, Homo sapiens; identical to SEQ ID NO: 2070
  source 1..1001: mol_type = other DNA

SEQ ID NO: 20012 - DNA, 1000 bp, Homo sapiens
  source 1..1000: mol_type = other DNA
ttctttcttatttatttgtacattatctgtttgtatccttgaattttctctgggatgttataaaagaaaaatattacaagcataatttctgacacaatgttttataactgttttcaaaagcaatctatttctctcttaatttctatagaacccattttagtcattcctatgatgaatgaaaaaaaactcacaattagttgtcagtttcagaaaggagtctcagaagcatcttagaaccacctaggcggtcttataggcgtcacagaaaaatattccaccttacttattcttatcttcttcaaactgactccaaatataataagcaggcttaagttatataaggttccttaaaagttgttctcaaaaacaattaaatgcagactgtcctcagtaaaacttgcattggcccagtccattttaccaagtttgctccttcttacatgtacgactgcccctgtgacaagtttaagcctacgttaattaatcatctttccataacangagacatattcatccaaccctgagagggataaggggtaacaggcaagatatattcaaattgtgacatttaaggtcaacttgactttaaaactcatatactgctcagttttcatatacgtggctgaaaacaagtcatcacagagaactggtcacactgttagaggaccaaaatagtaaaatatgaacaattcttccatatttaatgatattaaatataacaggtcctatgtctatgcaattgaagtcaacatgtcactaattagggcttcctttgttatcaaacttgctgagaagatagaacagtgaggaaaaaatagcaggaattgagctgtacagaattaaagacattcttatgaaccttaagacttaaggtcagtcacactcatatgacatttggactattagacaactcttctgacctcaaattttgctcttaccagttggtgataatcctttggtaagagagcatgttaaaagtaaccaaatcagataaggacta

SEQ ID NO: 20013 - DNA, 1001 bp, Homo sapiens; identical to SEQ ID NO: 2072
  source 1..1001: mol_type = other DNA

SEQ ID NO: 20014 - DNA, 1000 bp, Homo sapiens
  source 1..1000: mol_type = other DNA
tgtaaacttattagtgcctctgcacaccatataattaagatcaaattctccaagggtttaaaatagggactgctgctattgtgctgctgacagcgctaaggaacagatatttgccttttttacatagacggctctgccccgcttttgctgaaattcccactctcacagggctgggagcccagcagggtttacctggaccaatgaggggggctcactctgctgggaaatttgcttttatagatggcaccaccaacgctgaaaacatggaagtggaggcaaacattccagagcatctactgtcgcatcccctagaaggggactgtggtcaaggcagatcagtagacagaaggctggaagggaaatgagccccaaggaagaggctcagatccagagcctgtgtcttggtgagactccaacagaagtgcctcgaggctggtgcttcagaaggaagtgggtgtacagctgtgtaagtgatctgggtcatgaataaacaaatgaacmcaggaatgcatgcaccatgagagcctggaggggactataagacagacaacgggtgatctgggcacaggtatcaactgctgaacgcccagtgtgtgcgtggaggaggaagggggtcagaaaggcaaggaggatgtaccagtatggtagagacgagcaactgtgggcaaggggtgctcaggatgcatgggggtgtggagagaaggggagagcaagaaaggcttccaggggtgaggagccaaggaggtcctgaagacagctaggagttagcaggcagaggaaggggatgggcatcccagggagaaggaacggcaagaacaaagcagcacagccgtggagagcctgtcagtgagcggagagcccgtcagtgagcagctcgcctgggttccagggaacagggccagaatttttggcaggatagactcaaaggcctgaggtgaacctgcaaacaaaggtaaaaacactaactggttttaagcaggagagaaatatgatcagattt

SEQ ID NO: 20015 - DNA, 1001 bp, Homo sapiens; identical to SEQ ID NO: 2074
  source 1..1001: mol_type = other DNA

SEQ ID NO: 20016 - DNA, 1001 bp, Homo sapiens; identical to SEQ ID NO: 2075
  source 1..1001: mol_type = other DNA

SEQ ID NO: 20017 - DNA, 1001 bp, Homo sapiens; identical to SEQ ID NO: 2005
  source 1..1001: mol_type = other DNA

SEQ ID NO: 20018 - DNA, 1001 bp, Homo sapiens; identical to SEQ ID NO: 2006
  source 1..1001: mol_type = other DNA

SEQ ID NO: 20019 - DNA, 1001 bp, Homo sapiens; identical to SEQ ID NO: 2078
  source 1..1001: mol_type = other DNA

SEQ ID NO: 20020 - DNA, 1001 bp, Homo sapiens; identical to SEQ ID NO: 2079
  source 1..1001: mol_type = other DNA

SEQ ID NO: 20021 - DNA, 1001 bp, Homo sapiens; identical to SEQ ID NO: 2080
  source 1..1001: mol_type = other DNA

SEQ ID NO: 20022 - DNA, 1001 bp, Homo sapiens; identical to SEQ ID NO: 2081
  source 1..1001: mol_type = other DNA

SEQ ID NO: 20023 - DNA, 1001 bp, Homo sapiens; identical to SEQ ID NO: 2082
  source 1..1001: mol_type = other DNA

SEQ ID NO: 20024 - DNA, 1001 bp, Homo sapiens; identical to SEQ ID NO: 2083
  source 1..1001: mol_type = other DNA

SEQ ID NO: 20025 - DNA, 1001 bp, Homo sapiens
  source 1..1001: mol_type = other DNA
ttttccatcaggctcagaaagcagagtgacataaaagctgggtatgtgctaaggaggagggggagggaaagtctccaaataaatcatttaactcacagagtttaagactggaagattctcctgggccttgtaagctataaaaaaaagcagatctctgtcaagaggccttttctctaaagcagttctgactcagcctatttgcccttggaagatgctgcagcacctaagacatccacaggccatcagtcaacacgtgatctcctctctagctatgctccctctagaaatgcaggatcttttgccccatcctaaactcagaaaaggggtttcatgtgcagaacatggtggagaatcctaggtctctgactcacaaaaggatcaccttgggcctgagcttcctcatctatgaaatggggatgggaattcatgccttgctgtataattgcaaggattctatggagtaataaaggtaagcgtctggcatggtttctgtacatctcsggtgctcctggtactggctgtcacacaggtcaataaatatcatttcctcctaatctttccacatgcatagttattggaaagctgggtgggcagcaggctataatttttattttgcccaaaaaggcaggaccttattttgtttatagaaggcagaacctctttgttctgcttgaaacaaacaaacaaacaaaaaacctctccaaaggctcttttcatcctctgctaaattggacaatccagtcggtccctctggagtggactcagttgattgcctacccagcacccatttctccccaactccctacctcctttttatttctcctgctttatagaactctgatttcatacagatatattcatgttcctccctggccatgtgcctcaaggaaggtaatcccactccagctccagggggttttctgattggtctaagacttggttctcaatctcagagctattgatattttgggttggatttttttttattttttatttttatt

SEQ ID NO: 20026 - DNA, 1001 bp, Homo sapiens
  source 1..1001: mol_type = other DNA
ctatctggtggaatttgaaatatttgtgtgatccaggcacctatctttaaaaaggatggagtacttgaccttccatccttgtcccatggcccttcttcctttgcttgttcagtcaagccaaatcccaccacgtctctatcattgtaaaacttttcagggagaaaacctcaatggaaccagggaaagcatacctaccaggtcttttacttttactttttttttttaaggttgagttccacacactgttggtggcacctaaaaaaccactgccaccagttgaaaagttaattatggattaccccttgaaataaaatacaagttttattagaagtggagggataaatcaaaacagctggagggggaatgccatgaaactgctatgacgaagcccatgatgttctacttagagtaaacattctttttattttattttttttaagtcctgggtctgctgtgtagaaagtcatcatcgctttcatgtgggacaaaagaggatttggnaagggaatttccttaaatctgtgcattgaaaatgcagcttatgggagcctaaagaaaatacgttttgctttttcttacagtgggtgcctcttaattgtgacttttataaaccccttctgtagctatcataaccatccaattatctaacttcattttcgtatgattaaaagagcctctcttgccgaacatatgacaattattagaacgtttctaaaatctttttttctagtgatatgaaactcctgtagataaaataagtcttgatttatacaatcctcaagtacatgtgaatgttatgtctataaataaatactccatagtagatgcaaaatccctttataagtaacaatacattggcatattcattgaccaaaaagccttgtgatgttaatgttaacaaaattaaacttcagccatttcattcaactagtaattcctgagttctaaggactaggcactatgctaggcagggaagctatatatgtatgtgtgtctgtgcc

SEQ ID NO: 20027 - DNA, 1001 bp, Homo sapiens
  source 1..1001: mol_type = other DNA
accatccatggtgagcggctctaactttcaatctggccagatcattttccccttgtattaaaattgtcctggaaaaccattaggttgattttcaatcatcacagctaatacattccttgttgcaaatgccaagtattctgcacttgcttcagtttttcagatcttctctctcatattcagtacctggggtgaaatccatgcctagtaaaacagcccttttgtatccaggccaggatgcatctctgagacttgaatgcttttgctttctctcctgttttttgttttgttttgttttgttttgttttggttttgttttgttttgtttctcttctctgcctgatcaatactttcccatctgaagaagcaaaacattctctctcttctgtttcccttgctgctgattctggctcaaggggatgggggcaggagtggaggaaagagggtcagagtctatatttaaccacaaagataattcctccttgacagcagctccagagagantttgacatttgaggggactgagtagcaagagtaatttgcatttatctggctatagaaacagaagagattgggagcaacaagtgatctgtggaggtaaaaatgagtcaggggtttggaagagggaatatagggcaggtgaagaagaagaaattatttgccaacaatgatggaaggataaagaacaagactcctgaaactatttccttaaatgtcacactaaagcaactccaagaggattgtaatagctttggagtgggacaagtggcacagatgggaaggctgacatgtcccggctgcttaaatactctgaattctagatctgcatttatcaaaatttaatgtacacccgaattgccctggatcttgaataaaatgcatatattaattcagtaggttggggtgggccccaagattttgtatttttagcaagcttccaaatgaagctgatgttggtcctgggaccacactttgattagcaaagctctgctagagcgttttgg

SEQ ID NO: 20028 - DNA, 1001 bp, Homo sapiens
  source 1..1001: mol_type = other DNA
atattctttcctgtctgctgccttgtaagacgtgactttcgctttctgccatgattgtgaggcctccgtagccatgtggaactgtgagtccattaaacttctttttgtttataaattactcagtctcatgtatgtctttatcagcagcataaaaacagactaacataacccccctttcttcctacccctgtgatttgggtggatattaaaattttgcaagccgccactctagagaagtaccactcaaaccatggtctgcagactaccagcattagcaaggcctgggagtttgtgagagatgcagattcttggtgcccatccaaacctacagaagcagaatctctggtggcaggaaccagcaatctgtgctttcaacaagctctctgagtgcttcttctgaatgttaaagtataagaacctctgctgcacagggagacctcactttcattattctcatttcacagatgagaaaaatgagtcagtaggaggaaaagtgattgnctcaagtgcttaataagtgtctaagctaggatttgaccctagggcttgtgaatctggagcccatagactcaactcctgtgctatactgcctctgtgtctttggtctgtgttctcttctttttttttttttcttaccaccctccaaaattcttatttatttattttctatcaccgtacttactggtggagtggaagtcccttggaagtgggggacgtgtctgatttgtgcatggctattttgcgatttgccattgctggaatatttagcaagcatcaatgagtcctggagggcttttaaaccatagatgatcagggcccctgcttggtctaggatggagcctgcaattttgcatttgtgacaagctcccacggatgctggtgctcacttggcatagcaaggggttatgctatttttcaaaggcaagagaagtgtgcatgtacttgagaggagaaggggtcggtcaccatttactttgtgcctcttgctacccttcgttgcc

SEQ ID NO: 20029 - DNA, 1001 bp, Homo sapiens; identical to SEQ ID NO: 2004
  source 1..1001: mol_type = other DNA

SEQ ID NO: 20030 - DNA, 1001 bp, Homo sapiens; identical to SEQ ID NO: 2089
  source 1..1001: mol_type = other DNA

SEQ ID NO: 20031 - DNA, 1001 bp, Homo sapiens; identical to SEQ ID NO: 2090
  source 1..1001: mol_type = other DNA

SEQ ID NO: 20032 - DNA, 1001 bp, Homo sapiens; identical to SEQ ID NO: 2091
  source 1..1001: mol_type = other DNA

SEQ ID NO: 20033 - DNA, 1001 bp, Homo sapiens; identical to SEQ ID NO: 2009
  source 1..1001: mol_type = other DNA

SEQ ID NO: 20034 - DNA, 1001 bp, Homo sapiens; identical to SEQ ID NO: 2083
  source 1..1001: mol_type = other DNA

SEQ ID NO: 20035 - DNA, 1001 bp, Homo sapiens; identical to SEQ ID NO: 2094
  source 1..1001: mol_type = other DNA

SEQ ID NO: 20036 - DNA, 1001 bp, Homo sapiens
  source 1..1001: mol_type = other DNA
ttctttcttatttatttgtacattatctgtttgtatccttgaattttctctgggatgttataaaagaaaaatattacaagcataatttctgacacaatgttttataactgttttcaaaagcaatctatttctctcttaatttctatagaacccattttagtcattcctatgatgaatgaaaaaaaactcacaattagttgtcagtttcagaaaggagtctcagaagcatcttagaaccacctaggcggtcttataggcgtcacagaaaaatattccaccttacttattcttatcttcttcaaactgactccaaatataataagcaggcttaagttatataaggttccttaaaagttgttctcaaaaacaattaaatgcagactgtcctcagtaaaacttgcattggcccagtccattttaccaagtttgctccttcttacatgtacgactgcccctgtgacaagtttaagcctacgttaattaatcatctttccataacantgagacatattcatccaaccctgagagggataaggggtaacaggcaagatatattcaaattgtgacatttaaggtcaacttgactttaaaactcatatactgctcagttttcatatacgtggctgaaaacaagtcatcacagagaactggtcacactgttagaggaccaaaatagtaaaatatgaacaattcttccatatttaatgatattaaatataacaggtcctatgtctatgcaattgaagtcaacatgtcactaattagggcttcctttgttatcaaacttgctgagaagatagaacagtgaggaaaaaatagcaggaattgagctgtacagaattaaagacattcttatgaaccttaagacttaaggtcagtcacactcatatgacatttggactattagacaactcttctgacctcaaattttgctcttaccagttggtgataatcctttggtaagagagcatgttaaaagtaaccaaatcagataaggacta

SEQ ID NO: 20037 - DNA, 1001 bp, Homo sapiens; identical to SEQ ID NO: 2072
  source 1..1001: mol_type = other DNA

SEQ ID NO: 20038 - DNA, 1001 bp, Homo sapiens; identical to SEQ ID NO: 20028
  source 1..1001: mol_type = other DNA

SEQ ID NO: 20039 - DNA, 1001 bp, Homo sapiens; identical to SEQ ID NO: 2098
  source 1..1001: mol_type = other DNA

SEQ ID NO: 20040 - DNA, 954 bp, Homo sapiens
  source 1..954: mol_type = other DNA
ctcagcactttgggaggcttaggcaggagcatcgcttgtgtccaggagcttgaatctagcctgggcaacacagtgaggccccatcgctacaaataatcaaaattagccaggcgaggtgcatgtgcctgtagtcccagatactcaggaggctgaggcaggagaattgctgtcctcctgcaccagaagcctccagttgctttgtgtctcagtggctcaccctattctggacactttgcataaacagagtcccacaggcttgtcctcaggtgtctggctctgtcactcgcataatggccttgaggttctccacgccgcagcgtgcgtcaggacagcggcctccttcctttttcaggctaattctcccctgcacgcatggatcacgtttggtgcatccgtccacccacgaggaacactcgggtggttcctaccttctggctgccatgaacattcacggacaggcatttgtttgagtccctgttctgaatcctctggcctatatcsctaggagagaactgctgggtcctgcagtgcttccacgctgagcttttcgaggaactgccacaacgttccccatggcagctgcgcccttctgcttttccgccacgatgcacaaagctaacaatgcctctggtctctgtgtgcagtgcccttcagagagccgtcctcaccggcaaacaagcagcggcatccccctgggagcttgttctgaatgcccggcgcgtctccaaacacacttggagaaaccacctggacggtgctcaaccttgaacctctgaagcttttagacactgtcccgatgccaggtgccagcccagagcttcaggtgcaatgggtctgggcatgggggctttcataggctgcccagatgaccccactgtgtggccggggttgagacgacagccctgggagaagcttctgctgccacctgggctgctctgcggggagtatgctggc

SEQ ID NO: 20041 - DNA, 1001 bp, Homo sapiens
  source 1..1001: mol_type = other DNA
agacacacttcgtgacctcactaggatttgctttacaagataagattttcctggcaagcattgaagttagtgcccagattcaaaacagcaaacttaaaactattatcttcatgcttgctataatcaggtgtaccgcccaacttcccatccctacctccccttccctagtaatccagaggtactcaaggtcactactggctacttaaggtttacatccactcccaaggaaacaccagcaaccaaaagaatacttcccagatggaaaacccgtcatttgaccttggaatgctctgcctcccataatgaccaaaataaggtccggccagaggggcttacgttttttggtaaggaacaacacattgttttagagagataatctgacataactctgctaagctctgagtgtctatgcatggtaccacagcaaacaccctatgtcccaaatggaaactagcagggtgaaaaaattgttcatctaagatgacattaatctctgtatghctccttggtacagttcttttccacaacatgcagcttaagattcaacaattttttcattgtgttttgtgtttcctgaagcattcctccagctacctgaagctctcactgattaaaatagacctcctttactaaaaggggtaaactgaggcacagaagaacaaagcaatgtgccttatagttcagaataggtaaacaaaaattggacatctattattttcaaatctctttagattaaaagaaaaaaaaatgtatttctcaaagtccaaagtcaaccttctccaaagggaaactgcatgtctgtctagtaacctataggatcattcacacttttttttccttgagaaggaactaacttgccagcctaccaacaattttgccagtgccttggcatcaggcatatctgcacaacctttccagagcctatatcatagtgatctgttcaagctgctcaaagctcagtaatcatactaatctgtgcatagtgaccagtgctacctgct

SEQ ID NO: 20042 - DNA, 1001 bp, Homo sapiens
  source 1..1001: mol_type = other DNA
gctcccccaaagatatttacatcctaccctgtgaatatgctaccttacatggaaaaaggggctttaaaaatatgattgagttgagaatcttgagatggaaagttatccagtattatctgagtgggcccaatgtcctcacaagggtccttataaagtgagaaataagaggatcaaagtaagtagtaggtgatgtgacagcagaagcaagaggttggagtgatttaaggaagtgggagatcaggaagtgttaagcacaaagttaacttatacctttaaaaaaaaaggaaaattaaagacaacaagcagatatatacattatataaataaacacaagaacttgttaaacttgtgaaacacaggactacccaagacaaatgtttccctttccatttctactctaggctatatgaggaatctatttttctctttttcttagaactcttactctgcaggatcaaaatgtcaagcagtgaccacataagtgggaagtagatcaagacntgcttataattacattcttgtggttggtataaaattctgtaccacagccattccttagaagccagctcatgggatcaaacagacaagcaagctcacttctcaagcccacgatgttacgtattagtccatattggtgagttcctttgtgcccaaacttagctgccgcacactacagtgataggaaactgccaacagttttttgtcaaacccactacagtggatcccacaatgggctgagacctcgtctagagtcatcaggttttccaggatgtgcagatggcctggaaacttggccaagaggtagggatcagcactctttagtaagctgtatatccaccaaatgctgtgacacaaggaatgggcctcaaaatgtttcaggccagcacagctttgtctttgcaagtcatttttcagtggcagttaaatattgtggcaaagccaaggtacagactcacgtgcattaaaatatgcttatgagtaataataccataagtatttcc

SEQ ID NO: 20043 - DNA, 1001 bp, Homo sapiens
  source 1..1001: mol_type = other DNA
ggggtcaggttgctggtcccagccttgcaccctgagctaggacaccagttcccctgaccctgttcttccctcctggctgcaggcacccccagccagaacacgcagtgccagccgtgccccccaggcaccttctcagccagcagctccagctcagagcagtgccagccccaccgcaactgcacggccctgggcctggccctcaatgtgccaggctcttcctcccatgacaccctgtgcaccagctgcactggcttccccctcagcaccagggtaccaggtgagccagaggcctgagggggcagcacactgcaggccaggcccacttgtgccctcactcctgcccctgcacgtgcatctagcctgaggcatgccagctggctctgggaaggggccacagtggatttgaggggtcaggggtccctccactagatccccaccaagtctgccctctcaggggtggctgagaatttggatctgagccagggcacagcctcccctggngagctctgggaaagtgggcagcaatctcctaactgcccgaggggaaggtggctggctcctctgacacggggaaaccgaggcctgatggtaactctcctaactgcctgagaggaaggtggctgcctcctctgacatggggaaaccgaggcccaatgttaaccactgttgagaagtcacagggggaagtgacccccttaacatcaagtcaggtccggtccatctgcaggtcccaactcgccccttccgatggcccaggagccccaagcccttgcctgggcccccttgcctcttgcagccaaggtccgagtggccgctcctgccccctaggcctttgctccagctctctgaccgaaggctcctgccccttctccagtccccatcgttgcactgccctctccagcacggctcactgcacagggatttctctctcctgcaaaccccccgagtggggcccagaaagcagggtacctggcagcccccgccagtgtgtgtgggtgaaa

SEQ ID NO: 20044 - DNA, 1001 bp, Homo sapiens; identical to SEQ ID NO: 2106
  source 1..1001: mol_type = other DNA

SEQ ID NO: 20045 - DNA, 1001 bp, Homo sapiens; identical to SEQ ID NO: 2107
  source 1..1001: mol_type = other DNA

SEQ ID NO: 20046 - DNA, 1000 bp, Homo sapiens
  source 1..1000: mol_type = other DNA
gacaggagctgggcagcagcaggaagacggggggcacccctcctggcgtcctggccgccgggacacccctctccgggagaggacactcggtgcccctccgtgaagccggtaacctcggctgcgccacctcccccacccgcgcgcccgcgccgggaaagccagcgtggccccagtctccgaatttctcggaatgaacaacagcaaattgaatccagggctccggcgggggccgcctttgctggccactggttctgcagcctggcgagactgcgcttagtccccgcctggagtgcctcccgaaggcctggctggaagctagactcagtccctttgtagtagcagcggtggagcagggaccagcgtcttggacgggtgacccagactcaattccgactttggccgagggcatgtttgacactgggtgtgaaatctagacagttcccgcggtcatagagatggggcagcagcattcaggcagggctcagaactgtccgggtcccrtcagtgttggggcggaagaggaagagtgtcaactgagccagcatttatttattttattgttgtttgagacagggtgtcgctctgtcgcccaggctggagtgcagtgggcagcatctcagctactgcagcctccgcctcccgtgctcaagcgatcctcccacgtcagcctcccaagaaggtggtattattggccacgcctggccaatttttgtattttttgtagagaggaggtctcactgtgttgcccaggctgttcttgtactcctgagctccagcaatccacccgccttggcctctgaaagcgctgggattacaggcttgaggcaccgtgcccagctgagccaggcttttaaaaccggttctgtccctacccagagagcttcttacctggcggcctccttaacctctgacaccagctgaccacgcttatgagccaaacataaaaaccaaaagaaacccaggcttggtggctcacgcctgtaatcccagcactttggga

SEQ ID NO: 20047 - DNA, 1001 bp, Homo sapiens
  source 1..1001: mol_type = other DNA
tatccaccagccttggcctcccaaagtgctaggattacaggcatgagccaccacgcatggcctgtcttttcttcttggtcattttcgctaaaggtttgtcaattttgttgatcttttttgttgctgatctctattgttttcccattctgtttcatttatttccattttaacctttgtttccttttttctgctggtttgggtttaatttgctctttttttcccctaatttttcaaggtatacagttaagttattgatttgagatctcttttttcttttctttttttttttttttttttttttttggttgctgttgagatggagtctccctctgtcacccagactggagtgcagtggcatgatctcagctcactgcagcctccgccgcccaggcgattctcctgcctcagcctcctgagtagacgtttcccggccaaggtgtttctttttgaatgtaagcatttacagctacagatttccctctaaacactgctttcactgcdttccataagattgttttttgttgttgttttgttgtttgagacacagtctcactctgttgccgtttggagagcagcgatgcgatcatagctctgtagccttgagctcctggactcaatcagtcctcctgcctcagcctcccaagtagctgggactacaggtgtacaccactgcacctaactaatttcttttataagtttttgcagaggccaggcacagtggctcacacctgtaatcccagcactttgggaggccaaggtgggtggatcacctaaggtcaggagttcgagaccagcctggccgacagggagaaaccccatctctactaaaaatacaaaaattagctgggcgtggtggcaggtgcctgtaatcccagctactcaggaggctgaggcaggagaatcgcttgaacctgggaggcagaggttgcagtgagccaggatcacaccattgcactccagcctgggtaacaaaagcaaaactccatctcaagaaaagaaaa

SEQ ID NO: 20048 - DNA, 1001 bp, Homo sapiens
  source 1..1001: mol_type = other DNA
catctggctacctcggcctcccaaagtgctgggattacaggcgtgagccaccaagcccagcctaacgttacatttctttctttctttttctttccttttttttttttttgagacagactctcactctgctgcccaggctggagtgcagtggcatgatcttgtctcactacaacctctgtctcccaggttcaagcaattctcgtgcctcagcctccccagtagctaggattacaggcacccaccaccacccccagctaactttttatattattagtagagacagggtttcaccatgttggctgggctggtcttgaactcctgacctgaagtgatccaccctcctcaggcttccaaagtgctgggattacaggcatgagccatggtgcccggctatatttctaagtttattttgcttcatataccaggaaccgtagtttgtttcacatgtggtcttgaaaatagtttgttctgttctgattataagtaacatgtgtttattgnttttttttaaaaaagggtaaatatccaggtgcagtggcatgtgcttgtagtcccagctactcaggaggctgaggccggaggaagcttttgagcccaggcatttgagactgtagtgagctgtgattgttccactgcattctaacctgggtgatagagcaagaccctgtctcaaaaataaaatacaattaaattaaatttaaaaattaaaaaattgataaatatagaaaaaatgtgaaaaccaaaggggaacgcctcccactaccagagatcatttctattttcattctggagaatttccttctagtttttttttaaaacgcataaatatgggaaatacacaattatgggaaatatacaacttcccataatgagttaacacaccatttacgattttgtgtcctgctagtctgtcattatgtcattagcgtttatcccttgcataaaatgcttctcagattactaaatggcaacatactataatattgaactttgtggatatc

SEQ ID NO: 20049 - skipped

SEQ ID NO: 20050 - protein, 251 aa, Homo sapiens
MAEDLGLSFGETASVEMLPEHGSCRPKARSSSARWALTCCLVLLPFLAGLTTYLLVSQLRAQGEACVQFQALKGQEFAPSHQQVYAPLRADGDKPRAHLTVVRQTPTQHFKNQFPALHWEHELGLAFTKNRMNYTNKFLLIPESGDYFIYSQVTFRGMTSECSEIRQAGRPNKPDSITVVITKVTDSYPEPTQLLMGTKSVCEVGSNWFQPIYLGAMFSLQEGDKLMVNVSDISLVDYTKEDKTFFGAFLL

SEQ ID NO: 20051 - protein, 192 aa, Homo sapiens
MQLTKGRLHFSHPLSHTKHISPFVTDAPLRADGDKPRAHLTVVRQTPTQHFKNQFPALHWEHELGLAFTKNRMNYTNKFLLIPESGDYFIYSQVTFRGMTSECSEIRQAGRPNKPDSITVVITKVTDSYPEPTQLLMGTKSVCEVGSNWFQPIYLGAMFSLQEGDKLMVNVSDISLVDYTKEDKTFFGAFLL

SEQ ID NO: 20052 - protein, 174 aa, Homo sapiens
MRRFLSKVYSFPMRKLILFLVFPVVRQTPTQHFKNQFPALHWEHELGLAFTKNRMNYTNKFLLIPESGDYFIYSQVTFRGMTSECSEIRQAGRPNKPDSITVVITKVTDSYPEPTQLLMGTKSVCEVGSNWFQPIYLGAMFSLQEGDKLMVNVSDISLVDYTKEDKTFFGAFLL

SEQ ID NO: 20053 - protein, 483 aa, Homo sapiens
MFCSTSAVNSCARCFFHSVCPAGMIVKFPGTAQKNTVCEPASPGVSPACASPENCKEPSSGTIPQAKPTPVSPATSSASTMPVRGGTRLAQEAASKLTRAPDSPSSVGRPSSDPGLSPTQPCPEGSGDCRKQCEPDYYLDEAGRCTACVSCSRDDLVEKTPCAWNSSRTCECRPGMICATSATNSCARCVPYPICAAETVTKPQDMAEKDTTFEAPPLGTQPDCNPTPENGEAPASTSPTQSLLVDSQASKTLPIPTSAPVALSSTGKPVLDAGPVLFWVILVLVVVVGSSAFLLCHRRACRKRIRQKLHLCYPVQTSQPKLELVDSRPRRSSTLRSGASVTEPVAEERGLMSQPLMETCHSVGAAYLESLPLQDASPAGGPSSPRDLPEPRVSTEHTNNKIEKIYIMKADTVIVGTVKAELPEGRGLAGPAEPELEEELEADHTPHYPEQETEPPLGSCSDVMLSVEEEGKEDPLPTAASGK

SEQ ID NO: 20054 - protein, 595 aa, Homo sapiens
MRVLLAALGLLFLGALRAFPQDRPFEDTCHGNPSHYYDKAVRRCCYRCPMGLFPTQQCPQRPTDCRKQCEPDYYLDEADRCTACVTCSRDDLVEKTPCAWNSSRVCECRPGMFCSTSAVNSCARCFFHSVCPAGMIVKFPGTAQKNTVCEPASPGVSPACASPENCKEPSSGTIPQAKPTPVSPATSSASTMPVRGGTRLAQEAASKLTRAPDSPSSVGRPSSDPGLSPTQPCPEGSGDCRKQCEPDYYLDEAGRCTACVSCSRDDLVEKTPCAWNSSRTCECRPGMICATSATNSCARCVPYPICAAETVTKPQDMAEKDTTFEAPPLGTQPDCNPTPENGEAPASTSPTQSLLVDSQASKTLPIPTSAPVALSSTGKPVLDAGPVLFWVILVLVVVVGSSAFLLCHRRACRKRIRQKLHLCYPVQTSQPKLELVDSRPRRSSTQLRSGASVTEPVAEERGLMSQPLMETCHSVGAAYLESLPLQDASPAGGPSSPRDLPEPRVSTEHTNNKIEKIYIMKADTVIVGTVKAELPEGRGLAGPAEPELEEELEADHTPHYPEQETEPPLGSCSDVMLSVEEEGKEDPLPTAASGK

SEQ ID NO: 20055 - protein, 116 aa, synthetic construct
  REGION 1..116: note = Description of Artificial Sequence: Synthetic polypeptide
QVQLVQSGAEVKKPGASVKVSCKVSGYTFTDYYITWVRQAPGQALEWMGWIYPGSGNTKYSQKFQGRFVFSVDTSASTAYLQISSLKAEDTAVYYCANYGNYWFAYWGQGTLVTVS

SEQ ID NO: 20056 - protein, 111 aa, synthetic construct
  REGION 1..111: note = Description of Artificial Sequence: Synthetic polypeptide
EIVLTQSPDSLAVSLGERATINCKASQSVDFDGDSYLNWYQQKPGQPPKVLIYAASTLQSGVPSRFSGSGSGTDFTLTINSLEAEDAATYYCQQSNEDPWTFGGGTKVEIK

SEQ ID NO: 20057 - DNA, 1001 bp, Homo sapiens
  source 1..1001: mol_type = other DNA
tccttattcctggctcttccagaggctggtggctcttagggctcagcagggctgctgcctgggacagggagaccaggggacccaggaagccctggctcagaggaactgcattctgcccgcaacaaagacggagtcaaacaagaactccggagtttgcagaagtgtttccctttaaggaaacgcttctatcctgtgcagcaacctaggtttagggtccaactgtctccaaaggaccacttgagaagcaagaaggagcctggtgaggctgctcccagtgccctgcggccagcagtccacacagccggagagcccatctctgagctgggcgccccatggcaaagcaccccctgaacttaccagctcgaaggctgctgaagagcaggaagagcagtccaggactggaaaaaacaaccagaaaggcaggtgaggcggggccaccagggagttacctgtatcttccaaacaggaacaggctggttcccatgagcaggaggtagttangcccatcacagaaatgtgaaggcagagccaggagcctgcctgcctctgttctccatgggaattcggggtccggggccaggaccaccaccctcctgcccagcacagcaagtccgaggggctggcagcctctcaccactctctagctctcgcggtaacaaatccccagaaacacagtgatgctggcgtgaggatgaaggggagcgagggacgccagtgaggctggtctagccttcctggggacagatgccaagaagttgtaggaaatcagaaaaaaaaaaaaaaaaaaaagctttcagggcacatatagtaggagtgtcacttaaaatgctggggagacggagaacatcaggcgtgcccgtgacagggtcaggtgagtgacgggacagccctgtgcggaacgcggatcattttgaaaccaaacctgagctcctcctgtttcagatcctgctgcagctggtgcccctgcctcgggcagcaaattcccctcgtgactccaatgc

SEQ ID NO: 20058 - DNA, 1001 bp, Homo sapiens
  source 1..1001: mol_type = other DNA
tctggctgccgacagtcaggttctgctgcagaagcacgttctctatgcagcagccaatgttcacgctgggggtccgtgcgatcctcagcacgctgaccacgtcatacaagccccgcatgttcaagaagacggtgtcattctgcagagcctggtccagcaggctgttgtccgtcttattgatccagtacacgttgggcctggggtagccgtttatggatgtacacgtgaaggtgagctcatcctgggaggggctgtggggggcgctgacgacgggcacgctgaagtttgctgcaggggagggaaacagattgtgagagatgccagaccctgctggtcaagaaacagagggtacacggtgccaaggctgggtcagaggggaggcggcccattgtgccccgacatgggtgacaggccaggaccagggctgtggtccgagcagcaggctccgccctgtcctgcccaagagtcatcccccaagccagtcccagtagccagggaccnctgagcctgtcgggcagtgactggcacccacagaccccccactccacagccgtcggctgtgccgggaccccctcatttggatctggtcattctcactgctgacacaggggctcacagtccatctgaaatggacacagctgttctccccaatgaactgcccagagctccttggttgcctcttatttttctcttaaattttgttctcatttagtgctttatagagttcccttcaaatttcacttttaaaactctagtttggatgtggtggctcacgcctgtaatcacagcactttgggagggtgaggcaggaggatcgcttgtgtccaggagtttgagaccagcctgggcaacatagtgagaccccatttctacaaataatcaaaattagccaggcgaggtggcatgtgcctgtagtcccagatactcaggaggctgaagcaggagaattgcttgagctcaggaggtcaaggctgcagcgtgatcacgctactgcactccag

SEQ ID NO: 20059 - DNA, 1001 bp, Homo sapiens
  source 1..1001: mol_type = other DNA
agaatttctcagcaattacattatattgctgctcacttgcagtaggaaagctgtcacaaatgtggcagacacagggtagctttactgtttgtgcagctacgtaaatgcctgtgggaaaatctttttttttgagatggagtcttgctccgtcacccaggctggggtgcaatggcgtgatctcagctcactgcaacccccgactctggggttcacgccattctcctgcctcaccctcccaagtagctgggattacaggtgcccgccaccatgcccagctaattttttgtatttttagtagagatcgggcttcactatgttggccagcctggtctcgaactcctgacctcaggtgatccacccgccttggcctcccaaagtcctgggattacaggagtgagccactgcacctggcacctgcaggaaaatctgtgtgtgtcccctgcccccaaagccctctgggctggaaggcttggcaaggtttcaggtttgtgctgcggtgcntcgtccttattcctggctcttccagaggctggtggctcttagggctcagcagggctgctgcctgggacagggagaccaggggacccaggaagccctggctcagaggaactgcattctgcccgcaacaaagacggagtcaaacaagaactccggagtttgcagaagtgtttccctttaaggaaacgcttctatcctgtgcagcaacctaggtttagggtccaactgtctccaaaggaccacttgagaagcaagaaggagcctggtgaggctgctcccagtgccctgcggccagcagtccacacagccggagagcccatctctgagctgggcgccccatggcaaagcaccccctgaacttaccagctcgaaggctgctgaagagcaggaagagcagtccaggactggaaaaaacaaccagaaaggcaggtgaggcggggccaccagggagttacctgtatcttccaaacaggaacaggctggttcccatgagcaggaggtag

SEQ ID NO: 20060-364100 - skipped (344041 entries)

SEQ ID NO: 364101 - DNA, 19 bp, synthetic construct
  misc_feature 1..19: note = Description of Artificial Sequence: Synthetic primer
  source 1..19: mol_type = other DNA
tgcttctggaagtgaaagt

SEQ ID NO: 364102 - DNA, 20 bp, synthetic construct
  misc_feature 1..20: note = Description of Artificial Sequence: Synthetic primer
  source 1..20: mol_type = other DNA
gtcatcatcgctttcatgtg

SEQ ID NO: 364103 - DNA, 19 bp, synthetic construct
  misc_feature 1..19: note = Description of Artificial Sequence: Synthetic primer
  source 1..19: mol_type = other DNA
ctggatgctcacaggtttg

SEQ ID NO: 364104 - DNA, 21 bp, synthetic construct
  misc_feature 1..21: note = Description of Artificial Sequence: Synthetic primer
  source 1..21: mol_type = other DNA
agtccctgttctgaatcctct

SEQ ID NO: 364105 - DNA, 23 bp, synthetic construct
  misc_feature 1..23: note = Description of Artificial Sequence: Synthetic primer
  source 1..23: mol_type = other DNA
ctttttgtctcctacctcagagg

SEQ ID NO: 364106 - DNA, 20 bp, synthetic construct
  misc_feature 1..20: note = Description of Artificial Sequence: Synthetic primer
  source 1..20: mol_type = other DNA
ataagaacctctgctgcaca

SEQ ID NO: 364107 - DNA, 20 bp, synthetic construct
  misc_feature 1..20: note = Description of Artificial Sequence: Synthetic primer
  source 1..20: mol_type = other DNA
ttgggaatcagataggtgca

SEQ ID NO: 364108 - DNA, 20 bp, synthetic construct
  misc_feature 1..20: note = Description of Artificial Sequence: Synthetic primer
  source 1..20: mol_type = other DNA
aaacaggaacaggctggttc

SEQ ID NO: 364109 - DNA, 18 bp, synthetic construct
  misc_feature 1..18: note = Description of Artificial Sequence: Synthetic primer
  source 1..18: mol_type = other DNA
ccaagccagtcccagtag

SEQ ID NO: 364110 - DNA, 20 bp, synthetic construct
  misc_feature 1..20: note = Description of Artificial Sequence: Synthetic primer
  source 1..20: mol_type = other DNA
ttggcaaggtttcaggtttg

SEQ ID NO: 364111 - DNA, 21 bp, synthetic construct
  misc_feature 1..21: note = Description of Artificial Sequence: Synthetic primer
  source 1..21: mol_type = other DNA
tgaggttcaaaatgacagagg

SEQ ID NO: 364112 - DNA, 23 bp, synthetic construct
  misc_feature 1..23: note = Description of Artificial Sequence: Synthetic primer
  source 1..23: mol_type = other DNA
ttttcaatgcacagatttaagga

SEQ ID NO: 364113 - DNA, 24 bp, synthetic construct
  misc_feature 1..24: note = Description of Artificial Sequence: Synthetic primer
  source 1..24: mol_type = other DNA
cctaaggagacttttagttctaag

SEQ ID NO: 364114 - DNA, 19 bp, synthetic construct
  misc_feature 1..19: note = Description of Artificial Sequence: Synthetic primer
  source 1..19: mol_type = other DNA
atggggaacgttgtggcag

SEQ ID NO: 364115 - DNA, 18 bp, synthetic construct
  misc_feature 1..18: note = Description of Artificial Sequence: Synthetic primer
  source 1..18: mol_type = other DNA
cggcagccagacaggtaa

SEQ ID NO: 364116 - DNA, 20 bp, synthetic construct
  misc_feature 1..20: note = Description of Artificial Sequence: Synthetic primer
  source 1..20: mol_type = other DNA
acagaggcagtatagcacag

SEQ ID NO: 364117 - DNA, 20 bp, synthetic construct
  misc_feature 1..20: note = Description of Artificial Sequence: Synthetic primer
  source 1..20: mol_type = other DNA
atcaagtcacaactgccaga

SEQ ID NO: 364118 - DNA, 20 bp, synthetic construct
  misc_feature 1..20: note = Description of Artificial Sequence: Synthetic primer
  source 1..20: mol_type = other DNA
gctctgccttcacatttctg

SEQ ID NO: 364119 - DNA, 21 bp, synthetic construct
  misc_feature 1..21: note = Description of Artificial Sequence: Synthetic primer
  source 1..21: mol_type = other DNA
aatgaccagatccaaatgagg

SEQ ID NO: 364120 - DNA, 19 bp, synthetic construct
  misc_feature 1..19: note = Description of Artificial Sequence: Synthetic primer
  source 1..19: mol_type = other DNA
gtcccctggtctccctgtc

SEQ ID NO: 364121 - DNA, 12 bp, synthetic construct
  misc_feature 1..12: note = Description of Artificial Sequence: Synthetic probe
  source 1..12: mol_type = other DNA
tgcagattggga

SEQ ID NO: 364122 - DNA, 14 bp, synthetic construct
  misc_feature 1..14: note = Description of Artificial Sequence: Synthetic probe
  source 1..14: mol_type = other DNA
atttggaaagggaa

SEQ ID NO: 364123 - DNA, 14 bp, synthetic construct
  misc_feature 1..14: note = Description of Artificial Sequence: Synthetic probe
  source 1..14: mol_type = other DNA
agaatacacaagga

SEQ ID NO: 364124 - DNA, 11 bp, synthetic construct
  misc_feature 1..11: note = Description of Artificial Sequence: Synthetic probe
  source 1..11: mol_type = other DNA
tcctagcgata

SEQ ID NO: 364125 - DNA, 12 bp, synthetic construct
  misc_feature 1..12: note = Description of Artificial Sequence: Synthetic probe
  source 1..12: mol_type = other DNA
cgggcacagctc

SEQ ID NO: 364126 - DNA, 14 bp, synthetic construct
  misc_feature 1..14: note = Description of Artificial Sequence: Synthetic probe
  source 1..14: mol_type = other DNA
agtgattgactcaa

SEQ ID NO: 364127 - DNA, 14 bp, synthetic construct
  misc_feature 1..14: note = Description of Artificial Sequence: Synthetic probe
  source 1..14: mol_type = other DNA
ccattaaagtcaga

SEQ ID NO: 364128 - DNA, 13 bp, synthetic construct
  misc_feature 1..13: note = Description of Artificial Sequence: Synthetic probe
  source 1..13: mol_type = other DNA
tagttaagcccat

SEQ ID NO: 364129 - DNA, 12 bp, synthetic construct
  misc_feature 1..12: note = Description of Artificial Sequence: Synthetic probe
  source 1..12: mol_type = other DNA
agggaccgctga

SEQ ID NO: 364130 - DNA, 13 bp, synthetic construct
  misc_feature 1..13: note = Description of Artificial Sequence: Synthetic probe
  source 1..13: mol_type = other DNA
cggtgcttcgtcc

SEQ ID NO: 364131 - DNA, 12 bp, synthetic construct
  misc_feature 1..12: note = Description of Artificial Sequence: Synthetic probe
  source 1..12: mol_type = other DNA
tgcaggttggga

SEQ ID NO: 364132 - DNA, 14 bp, synthetic construct
  misc_feature 1..14: note = Description of Artificial Sequence: Synthetic probe
  source 1..14: mol_type = other DNA
atttggcaagggaa

SEQ ID NO: 364133 - DNA, 12 bp, synthetic construct
  misc_feature 1..12: note = Description of Artificial Sequence: Synthetic probe
  source 1..12: mol_type = other DNA
tagaatccacaa

SEQ ID NO: 364134 - DNA, 11 bp, synthetic construct
  misc_feature 1..11: note = Description of Artificial Sequence: Synthetic probe
  source 1..11: mol_type = other DNA
tcctagggata

SEQ ID NO: 364135 - DNA, 13 bp, synthetic construct
  misc_feature 1..13: note = Description of Artificial Sequence: Synthetic probe
  source 1..13: mol_type = other DNA
tcgggctcagctc

SEQ ID NO: 364136 - DNA, 14 bp, synthetic construct
  misc_feature 1..14: note = Description of Artificial Sequence: Synthetic probe
  source 1..14: mol_type = other DNA
agtgattggctcaa

SEQ ID NO: 364137 - DNA, 15 bp, synthetic construct
  misc_feature 1..15: note = Description of Artificial Sequence: Synthetic probe
  source 1..15: mol_type = other DNA
accattaaattcaga

SEQ ID NO: 364138 - DNA, 12 bp, synthetic construct
  misc_feature 1..12: note = Description of Artificial Sequence: Synthetic probe
  source 1..12: mol_type = other DNA
tagttaggccca

SEQ ID NO: 364139 - DNA, 12 bp, synthetic construct
  misc_feature 1..12: note = Description of Artificial Sequence: Synthetic probe
  source 1..12: mol_type = other DNA
agggaccactga

SEQ ID NO: 364140 - DNA, 13 bp, synthetic construct
  misc_feature 1..13: note = Description of Artificial Sequence: Synthetic probe
  source 1..13: mol_type = other DNA
cggtgcctcgtcc

SEQ ID NO: 364141 - DNA, 20 bp, synthetic construct
  misc_feature 1..20: note = Description of Artificial Sequence: Synthetic primer
  source 1..20: mol_type = other DNA
aaacaggaacaggctggttc

SEQ ID NO: 364142 - DNA, 21 bp, synthetic construct
  misc_feature 1..21: note = Description of Artificial Sequence: Synthetic primer
  source 1..21: mol_type = other DNA
gatcttgggaatcagataggt

SEQ ID NO: 364143 - DNA, 27 bp, synthetic construct
  misc_feature 1..27: note = Description of Artificial Sequence: Synthetic primer
  source 1..27: mol_type = other DNA
gaaatcaggttagaaatacacacatta

SEQ ID NO: 364144 - DNA, 20 bp, synthetic construct
  misc_feature 1..20: note = Description of Artificial Sequence: Synthetic primer
  source 1..20: mol_type = other DNA
caccccatttctgctttctg

SEQ ID NO: 364145 - DNA, 20 bp, synthetic construct
  misc_feature 1..20: note = Description of Artificial Sequence: Synthetic primer
  source 1..20: mol_type = other DNA
gctctgccttcacatttctg

SEQ ID NO: 364146 - DNA, 20 bp, synthetic construct
  misc_feature 1..20: note = Description of Artificial Sequence: Synthetic primer
  source 1..20: mol_type = other DNA
acaactgccagacatatttg

SEQ ID NO: 364147 - DNA, 19 bp, synthetic construct
  misc_feature 1..19: note = Description of Artificial Sequence: Synthetic primer
  source 1..19: mol_type = other DNA
cccaccagcccatgttatt

SEQ ID NO: 364148 - DNA, 19 bp, synthetic construct
  misc_feature 1..19: note = Description of Artificial Sequence: Synthetic primer
  source 1..19: mol_type = other DNA
aggatgccgattcttcaca

SEQ ID NO: 364149 - DNA, 10 bp, synthetic construct
  misc_feature 1..10: note = Description of Artificial Sequence: Synthetic probe
  source 1..10: mol_type = other DNA
ttaagcccat

SEQ ID NO: 364150 - DNA, 15 bp, synthetic construct
  misc_feature 1..15: note = Description of Artificial Sequence: Synthetic probe
  source 1..15: mol_type = other DNA
cattaaagtcagagt

SEQ ID NO: 364151 - DNA, 15 bp, synthetic construct
  misc_feature 1..15: note = Description of Artificial Sequence: Synthetic probe
  source 1..15: mol_type = other DNA
cattaaagtcagagt

SEQ ID NO: 364152 - DNA, 15 bp, synthetic construct
  misc_feature 1..15: note = Description of Artificial Sequence: Synthetic probe
  source 1..15: mol_type = other DNA
attcgggtgtgcttg

SEQ ID NO: 364153 - DNA, 12 bp, synthetic construct
  misc_feature 1..12: note = Description of Artificial Sequence: Synthetic probe
  source 1..12: mol_type = other DNA
tagttaggccca

SEQ ID NO: 364154 - DNA, 16 bp, synthetic construct
  misc_feature 1..16: note = Description of Artificial Sequence: Synthetic probe
  source 1..16: mol_type = other DNA
ccattaaattcagagt

SEQ ID NO: 364155 - DNA, 15 bp, synthetic construct
  misc_feature 1..15: note = Description of Artificial Sequence: Synthetic probe
  source 1..15: mol_type = other DNA
atttaatgctaacgt

SEQ ID NO: 364156 - DNA, 15 bp, synthetic construct
  misc_feature 1..15: note = Description of Artificial Sequence: Synthetic probe
  source 1..15: mol_type = other DNA
attcaggtgtgcttg

SEQ ID NO: 364157 - DNA, 1001 bp, Homo sapiens
  source 1..1001: mol_type = other DNA
tatccaccagccttggcctcccaaagtgctaggattacaggcatgagccaccacgcatggcctgtcttttcttcttggtcattttcgctaaaggtttgtcaattttgttgatcttttttgttgctgatctctattgttttcccattctgtttcatttatttccattttaacctttgtttccttttttctgctggtttgggtttaatttgctctttttttcccctaatttttcaaggtatacagttaagttattgatttgagatctcttttttcttttctttttttttttttttttttttttttggttgctgttgagatggagtctccctctgtcacccagactggagtgcagtggcatgatctcagctcactgcagcctccgccgcccaggcgattctcctgcctcagcctcctgagtagacgtttcccggccaaggtgtttctttttgaatgtaagcatttacagctacagatttccctctaaacactgctttcactgcrttccataagattgttttttgttgttgttttgttgtttgagacacagtctcactctgttgccgtttggagagcagcgatgcgatcatagctctgtagccttgagctcctggactcaatcagtcctcctgcctcagcctcccaagtagctgggactacaggtgtacaccactgcacctaactaatttcttttataagtttttgcagaggccaggcacagtggctcacacctgtaatcccagcactttgggaggccaaggtgggtggatcacctaaggtcaggagttcgagaccagcctggccgacagggagaaaccccatctctactaaaaatacaaaaattagctgggcgtggtggcaggtgcctgtaatcccagctactcaggaggctgaggcaggagaatcgcttgaacctgggaggcagaggttgcagtgagccaggatcacaccattgcactccagcctgggtaacaaaagcaaaactccatctcaagaaaagaaaa

SEQ ID NO: 364158 - DNA, 1001 bp, Homo sapiens
  source 1..1001: mol_type = other DNA
catctggctacctcggcctcccaaagtgctgggattacaggcgtgagccaccaagcccagcctaacgttacatttctttctttctttttctttccttttttttttttttgagacagactctcactctgctgcccaggctggagtgcagtggcatgatcttgtctcactacaacctctgtctcccaggttcaagcaattctcgtgcctcagcctccccagtagctaggattacaggcacccaccaccacccccagctaactttttatattattagtagagacagggtttcaccatgttggctgggctggtcttgaactcctgacctgaagtgatccaccctcctcaggcttccaaagtgctgggattacaggcatgagccatggtgcccggctatatttctaagtttattttgcttcatataccaggaaccgtagtttgtttcacatgtggtcttgaaaatagtttgttctgttctgattataagtaacatgtgtttattgsttttttttaaaaaagggtaaatatccaggtgcagtggcatgtgcttgtagtcccagctactcaggaggctgaggccggaggaagcttttgagcccaggcatttgagactgtagtgagctgtgattgttccactgcattctaacctgggtgatagagcaagaccctgtctcaaaaataaaatacaattaaattaaatttaaaaattaaaaaattgataaatatagaaaaaatgtgaaaaccaaaggggaacgcctcccactaccagagatcatttctattttcattctggagaatttccttctagtttttttttaaaacgcataaatatgggaaatacacaattatgggaaatatacaacttcccataatgagttaacacaccatttacgattttgtgtcctgctagtctgtcattatgtcattagcgtttatcccttgcataaaatgcttctcagattactaaatggcaacatactataatattgaactttgtggatatc

What is claimed is:

1. A method of treating an inflammatory, a fibrotic, or a fibrostenotic disease or condition in a subject, the method comprising administering to the subject a therapeutically effective amount of an inhibitor of Tumor necrosis factor-like cytokine 1A (TL1A) activity or expression,
wherein at least three polymorphisms that are predictive of a positive therapeutic response in the subject to a treatment with the inhibitor of TL1A activity or expression with a positive predictive value or a specificity of at least about 51%, are detected in a sample obtained from the subject, and
wherein the inhibitor of TL1A activity or expression is an antibody or antigen binding fragment thereof that competes for binding to human TL1A with a reference antibody comprising a heavy chain variable region comprising: (a) an HCDR1 comprising an amino acid sequence set forth by SEQ ID NO: 1; (b) an HCDR2 comprising an amino acid sequence set forth by any one of SEQ ID NOS: 2-5; and (c) an HCDR3 comprising an amino acid sequence set forth by any one of SEQ ID NOS: 6-9; and the light chain variable region comprises: (d) an LCDR1 comprising an amino acid sequence set forth by SEQ ID NO: 10; (e) an LCDR2 comprising an amino acid sequence set forth by SEQ ID NO: 11; and (f) an LCDR3 comprising an amino acid sequence set forth by any one of SEQ ID NOS: 12-15.

2. The method of claim 1, wherein the at least three polymorphisms comprises
rs16901748, rs56124762, rs6478109, rs1892231, rs2070558, rs2070561, rs11897732,
rs6740739, rs17796285, rs7935393, rs12934476, rs12457255, rs2070557, rs4246905,
rs10974900, rs12434976, rs2815844, rs889702, rs2409750, rs1541020, rs4942248,
rs12934476, rs12457255, rs2297437, rs41309367, rs10733509, rs10750376,
rs10932456, rs1326860, rs1528663, rs951279, rs9806914, rs7935393, rs1690492,
rs420726, rs7759385, rs10974900, rs1326860, rs2548147, rs2815844, rs889702, rs9806914, rs7278257, or rs11221332, or a proxy polymorphism in linkage disequilibrium therewith as determined with an R² of at least 0.85, or a combination thereof.

3. A method of treating an inflammatory, a fibrotic, or a fibrostenotic disease or condition in a subject, the method comprising administering to the subject a therapeutically effective amount of an inhibitor of Tumor necrosis factor-like cytokine 1A (TL1A) activity or expression,
wherein at least three polymorphisms comprise rs16901748, rs56124762, rs6478109, rs1892231, rs2070558, rs2070561, rs11897732, rs6740739, rs17796285, rs7935393, rs12934476, rs12457255, rs2070557, rs4246905, rs10974900, rs12434976, rs2815844, rs889702, rs2409750, rs1541020, rs4942248, rs12934476, rs12457255, rs2297437, rs41309367, rs10733509, rs10750376, rs10932456, rs1326860, rs1528663, rs951279, rs9806914, rs7935393, rs1690492, rs420726, rs7759385, rs10974900, rs1326860, rs2548147, rs2815844, rs889702, rs9806914, rs7278257, or rs11221332, or a proxy polymorphism in linkage disequilibrium therewith as determined with an R² of at least 0.85, or a combination thereof, are detected in a sample obtained from the subject, and
wherein the inhibitor of TL1A activity or expression is an antibody or antigen binding fragment thereof that competes for binding to human TL1A with a reference antibody comprising a heavy chain variable region comprising: (a) an HCDR1 comprising an amino acid sequence set forth by SEQ ID NO: 1; (b) an HCDR2 comprising an amino acid sequence set forth by any one of SEQ ID NOS: 2-5; and (c) an HCDR3 comprising an amino acid sequence set forth by any one of SEQ ID NOS: 6-9; and the light chain variable region comprises: (d) an LCDR1 comprising an amino acid sequence set forth by SEQ ID NO: 10; (e) an LCDR2 comprising an amino acid sequence set forth by SEQ ID NO: 11; and (f) an LCDR3 comprising an amino acid sequence set forth by any one of SEQ ID NOS: 12-15.

4. A method of treating an inflammatory, a fibrotic, or a fibrostenotic disease or condition in a subject, the method comprising administering to the subject a therapeutically effective amount of an inhibitor of Tumor necrosis factor-like cytokine 1A (TL1A) activity or expression,
wherein at least three polymorphisms that are predictive of a positive therapeutic response in the subject to a treatment with the inhibitor of TL1A activity or expression with a positive predictive value or a specificity of at least about 51%, are detected in a sample obtained from the subject, and
wherein the inhibitor of TL1A activity or express is an antibody or antigen binding fragment thereof that binds to TL1A, comprising a heavy chain variable region comprising: (a) an HCDR1 comprising an amino acid sequence set forth by SEQ ID NO: 1; (b) an HCDR2 comprising an amino acid sequence set forth by any one of SEQ ID NOS: 2-5; and (c) an HCDR3 comprising an amino acid sequence set forth by any one of SEQ ID NOS: 6-9; and the light chain variable region comprises: (d) an LCDR1 comprising an amino acid sequence set forth by SEQ ID NO: 10; (e) an LCDR2 comprising an amino acid sequence set forth by SEQ ID NO: 11; and (f) an LCDR3 comprising an amino acid sequence set forth by any one of SEQ ID NOS: 12-15.

5. The method of claim 4, wherein the at least three polymorphisms comprises
rs16901748, rs56124762, rs6478109, rs1892231, rs2070558, rs2070561, rs11897732,
rs6740739, rs17796285, rs7935393, rs12934476, rs12457255, rs2070557, rs4246905,
rs10974900, rs12434976, rs2815844, rs889702, rs2409750, rs1541020, rs4942248,
rs12934476, rs12457255, rs2297437, rs41309367, rs10733509, rs10750376,
rs10932456, rs1326860, rs1528663, rs951279, rs9806914, rs7935393, rs1690492,
rs420726, rs7759385, rs10974900, rs1326860, rs2548147, rs2815844, rs889702,
rs9806914, rs7278257, or rs11221332, or a proxy polymorphism in linkage disequilibrium therewith as determined with an R² of at least 0.85, or a combination thereof.

6. A method of treating an inflammatory, a fibrotic, or a fibrostenotic disease or condition in a subject, the method comprising administering to the subject a therapeutically effective amount of an inhibitor of Tumor necrosis factor-like cytokine 1A (TL1A) activity or expression,
wherein at least three polymorphisms comprise rs16901748, rs56124762, rs6478109, rs1892231, rs2070558, rs2070561, rs11897732, rs6740739, rs17796285, rs7935393, rs12934476, rs12457255, rs2070557, rs4246905, rs10974900, rs12434976, rs2815844, rs889702, rs2409750, rs1541020, rs4942248, rs12934476, rs12457255, rs2297437, rs41309367, rs10733509, rs10750376, rs10932456, rs1326860, rs1528663, rs951279, rs9806914, rs7935393, rs1690492, rs420726, rs7759385, rs10974900, rs1326860, rs2548147, rs2815844, rs889702, rs9806914, rs7278257, or rs11221332, or a proxy polymorphism in linkage disequilibrium therewith as determined with an R² of at least 0.85, or a combination thereof, are detected in a sample obtained from the subject, and
wherein the inhibitor of TL1A activity or express is an antibody or antigen binding fragment thereof that binds to TL1A, comprising a heavy chain variable region comprising: (a) an HCDR1 comprising an amino acid sequence set forth by SEQ ID NO: 1; (b) an HCDR2 comprising an amino acid sequence set forth by any one of SEQ ID NOS: 2-5; and (c) an HCDR3 comprising an amino acid sequence set forth by any one of SEQ ID NOS: 6-9; and the light chain variable region comprises: (d) an LCDR1 comprising an amino acid sequence set forth by SEQ ID NO: 10; (e) an LCDR2 comprising an amino acid sequence set forth by SEQ ID NO: 11; and (f) an LCDR3 comprising an amino acid sequence set forth by any one of SEQ ID NOS: 12-15.

7. A method of treating an inflammatory, a fibrotic, or a fibrostenotic disease or condition in a subject, the method comprising administering to the subject a therapeutically effective amount of an inhibitor of Tumor necrosis factor-like cytokine 1A (TL1A) activity or expression,
wherein at least three polymorphisms that are predictive of a positive therapeutic response in the subject to a treatment with the inhibitor of TL1A activity or expression with a positive predictive value or a specificity of at least about 51%, are detected in a sample obtained from the subject, and
wherein the inhibitor of TL1A activity or express is an antibody or antigen binding fragment thereof that binds to tumor necrosis factor-like protein 1A (TL1A), comprising a heavy chain variable domain comprising an amino acid sequence at least about 90% identical to any one of SEQ ID NOS: 101-135, or 310-302, and a light chain variable domain comprising an amino acid sequence at least about 90% identical to any one of SEQ ID NOS: 201-206 or 303.

8. The method of claim 7, wherein the at least three polymorphisms comprises
rs16901748, rs56124762, rs6478109, rs1892231, rs2070558, rs2070561, rs11897732,
rs6740739, rs17796285, rs7935393, rs12934476, rs12457255, rs2070557, rs4246905,
rs10974900, rs12434976, rs2815844, rs889702, rs2409750, rs1541020, rs4942248,
rs12934476, rs12457255, rs2297437, rs41309367, rs10733509, rs10750376,
rs10932456, rs1326860, rs1528663, rs951279, rs9806914, rs7935393, rs1690492,
rs420726, rs7759385, rs10974900, rs1326860, rs2548147, rs2815844, rs889702,
rs9806914, rs7278257, or rs11221332, or a proxy polymorphism in linkage disequilibrium therewith as determined with an R² of at least 0.85, or a combination thereof.

9. The method of any one of claims 1-8, wherein the heavy chain variable domain comprises an amino acid sequence at least about 91%, 92%, 93%, 94%, 95%, 96%, 97%, 98%, 99%, or 100% identical to any one of SEQ ID NOS: 101-135, or 310-302.

10. The method of any one of claims 1-8, wherein the light chain variable domain comprises an amino acid sequence at least about 91%, 92%, 93%, 94%, 95%, 96%, 97%, 98%, 99%, or 100% identical to any one of SEQ ID NOS: 201-206 or 303.

11. A method of treating an inflammatory, a fibrotic, or a fibrostenotic disease or condition in a subject, the method comprising administering to the subject a therapeutically effective amount of an inhibitor of Tumor necrosis factor-like cytokine 1A (TL1A) activity or expression,
wherein at least three polymorphisms comprise rs16901748, rs56124762, rs6478109, rs1892231, rs2070558, rs2070561, rs11897732, rs6740739, rs17796285, rs7935393, rs12934476, rs12457255, rs2070557, rs4246905, rs10974900, rs12434976, rs2815844, rs889702, rs2409750, rs1541020, rs4942248, rs12934476, rs12457255, rs2297437, rs41309367, rs10733509, rs10750376, rs10932456, rs1326860, rs1528663, rs951279, rs9806914, rs7935393, rs1690492, rs420726, rs7759385, rs10974900, rs1326860, rs2548147, rs2815844, rs889702, rs9806914, rs7278257, or rs11221332, or a proxy polymorphism in linkage disequilibrium therewith as determined with an R² of at least 0.85, or a combination thereof, are detected in a sample obtained from the subject, and
wherein the inhibitor of TL1A activity or express is an antibody or antigen binding fragment thereof that binds to tumor necrosis factor-like protein 1A (TL1A), comprising a heavy chain variable domain comprising an amino acid sequence at least about 90% identical to any one of SEQ ID NOS: 101-135, or 310-302, and a light chain variable domain comprising an amino acid sequence at least about 90% identical to any one of SEQ ID NOS: 201-206 or 303.

12. A method of treating an inflammatory, a fibrotic, or a fibrostenotic disease or condition in a subject, the method comprising administering to the subject a therapeutically effective amount of an inhibitor of Tumor necrosis factor-like cytokine 1A (TL1A) activity or expression,
wherein at least three polymorphisms that are predictive of a positive therapeutic response in the subject to a treatment with the inhibitor of TL1A activity or expression with a positive predictive value or a specificity of at least about 51%, are detected in a sample obtained from the subject, and
wherein the inhibitor of TL1A activity or express is an antibody or antigen binding fragment thereof that binds to TL1A that comprises: (a) a heavy chain variable framework region comprising a human IGHV1-46*02 framework or a modified human IGHV1-46*02 framework; and (b) a light chain variable framework region comprising a human IGKV3-20 framework or a modified human IGKV3-20 framework; wherein the heavy chain variable framework region and the light chain variable framework region collectively comprise less than about 14 amino acid modifications from the human IGHV1-46*02 framework and the human IGKV3-20 framework.

13. The method of claim 12, wherein the at least three polymorphisms comprise rs16901748, rs56124762, rs6478109, rs1892231, rs2070558, rs2070561, rs11897732, rs6740739, rs17796285, rs7935393, rs12934476, rs12457255, rs2070557, rs4246905, rs10974900, rs12434976, rs2815844, rs889702, rs2409750, rs1541020, rs4942248, rs12934476, rs12457255, rs2297437, rs41309367, rs10733509, rs10750376, rs10932456, rs1326860, rs1528663, rs951279, rs9806914, rs7935393, rs1690492, rs420726, rs7759385, rs10974900, rs1326860, rs2548147, rs2815844, rs889702, rs9806914, rs7278257, or rs11221332, or a proxy polymorphism in linkage disequilibrium therewith as determined with an R² of at least 0.85, or a combination thereof.

14. A method of treating an inflammatory, a fibrotic, or a fibrostenotic disease or condition in a subject, the method comprising administering to the subject a therapeutically effective amount of an inhibitor of Tumor necrosis factor-like cytokine 1A (TL1A) activity or expression,
wherein at least three polymorphisms comprise rs16901748, rs56124762, rs6478109, rs1892231, rs2070558, rs2070561, rs11897732, rs6740739, rs17796285, rs7935393, rs12934476, rs12457255, rs2070557, rs4246905, rs10974900, rs12434976, rs2815844, rs889702, rs2409750, rs1541020, rs4942248, rs12934476, rs12457255, rs2297437, rs41309367, rs10733509, rs10750376, rs10932456, rs1326860, rs1528663, rs951279, rs9806914, rs7935393, rs1690492, rs420726, rs7759385, rs10974900, rs1326860, rs2548147, rs2815844, rs889702, rs9806914, rs7278257, or rs11221332, or a proxy polymorphism in linkage disequilibrium therewith as determined with an R² of at least 0.85, or a combination thereof, are detected in a sample obtained from the subject, and
wherein the inhibitor of TL1A activity or express is an antibody or antigen binding fragment thereof that binds to TL1A that comprises: (a) a heavy chain variable framework region comprising a human IGHV1-46*02 framework or a modified human IGHV1-46*02 framework; and (b) a light chain variable framework region comprising a human IGKV3-20 framework or a modified human IGKV3-20 framework; wherein the heavy chain variable framework region and the light chain variable framework region collectively comprise less than about 14 amino acid modifications from the human IGHV1-46*02 framework and the human IGKV3-20 framework.

15. The method of any one of claims 12-14, wherein an amino acid modification of the less than 14 amino acid modifications comprises: (a) the amino acid modification is at position 47 in the heavy chain variable region, and the amino acid at position 47 is R, N, D, C, Q, E, G, H, I, L, K, M, F, P, S, T, W, Y, or V; (b) the amino acid modification is at position 45 in the heavy chain variable region, and the amino acid at position 45 is A, N, D, C, Q, E, G, H, I, L, K, M, F, P, S, T, W, Y, or V; (c) the amino acid modification is at position 55 in the heavy chain variable region, and the amino acid at position 55 is A, R, N, D, C, Q, E, G, H, I, L, K, F, P, S, T, W, Y, or V; (d) the amino acid modification is at position 78 in the heavy chain variable region, and the amino acid at position 78 is A, R, N, D, C, Q, E, G, H, I, L, K, M, F, P, S, T, W, or Y; (e) the amino acid modification is at position 80 in the heavy chain variable region, and the amino acid at position 80 is A, R, N, D, C, Q, E, G, H, I, L, K, F, P, S, T, W, Y, or V; (f) the amino acid modification is at position 82 in the heavy chain variable region, and the amino acid at position 82 is A, N, D, C, Q, E, G, H, I, L, K, M, F, P, S, T, W, Y, or V; (g) the amino acid modification is at position 89 in the heavy chain variable region, and the amino acid at position 89 is A, R, N, D, C, Q, E, G, H, I, L, K, M, F, P, S, T, W, or Y; or (h) the amino acid modification is at position 91 in the heavy chain variable region, and the amino acid at position 91 is A, R, N, D, C, Q, E, G, H, I, L, K, F, P, S, T, W, Y, or V; or a combination of two or more modifications selected from (a) to (h).

16. The method of claim 15, wherein an amino acid modification of the less than 14 amino acid modifications comprises: A47R, R45K, M55I, V78A, M80I, R82T, V89A, M91L in the heavy chain variable region, per Aho or Kabat numbering.

17. The method of claim 15, wherein an amino acid modification of the less than 14 amino acid modifications comprises: (a) a modification at amino acid position 54 in the light chain variable region; and/or (b) a modification at amino acid position 55 in the light chain variable region; per Aho or Kabat numbering.

18. The method of any one of claims 12-14, wherein an amino acid modification of the less than 14 amino acid modifications comprises: (a) the amino acid modification is at position 54 of the light chain variable region, and the amino acid at position 54 is A, R, N, D, C, Q, E, G, H, I, K, M, F, P, S, T, W, Y, or V; and/or (b) the amino acid modification is at position 55 of the light chain variable region, and the amino acid at position 55 is A, R, N, D, C, Q, E, G, H, I, K, M, F, P, S, T, W, Y, or V.

19. The method of claim 18, wherein an amino acid modification of the less than 14 amino acid modifications comprises L54P and/or L55 W in the light chain variable region, per Aho or Kabat numbering.

20. A method of treating an inflammatory, a fibrotic, or a fibrostenotic disease or condition in a subject, the method comprising administering to the subject a therapeutically effective amount of an inhibitor of Tumor necrosis factor-like cytokine 1A (TL1A) activity or expression,
wherein at least three polymorphisms that are predictive of a positive therapeutic response in the subject to a treatment with the inhibitor of TL1A activity or expression with a positive predictive value or a specificity of at least about 51%, are detected in a sample obtained from the subject, and
wherein the inhibitor of TL1A activity or express is an antibody or antigen binding fragment thereof that binds to TL1A and comprises:
a heavy chain variable region comprising SEQ ID NO: 301 X1VQLVQSGAEVKKPGASVKVSCKAS[HCDR1]WVX2QX3PGQGLEW X4G[HCDR2]RX5TX6TX7DTSTSTX8YX9ELSSLRSEDTAVYYCAR[HC DR3]WGQGTTVTVSS, and
a light chain variable region comprising SEQ ID NO: 303 EIVLTQSPGTLSLSPGERATLSC[LCDR1]WYQQKPGQAPRX10X11IY[L CDR2]GIPDRFSGSGSGTDFTLTISRLEPEDFAVYYC[LCDR3]FGGGTKL EIK, wherein each of X1-X11 is independently selected from A, R, N, D, C, Q, E, G, H, I, L, K, M, F, P, S, T, W, Y, or V.

21. A method of treating an inflammatory, a fibrotic, or a fibrostenotic disease or condition in a subject, the method comprising administering to the subject a therapeutically effective amount of an inhibitor of Tumor necrosis factor-like cytokine 1A (TL1A) activity or expression,
wherein at least three polymorphisms that are predictive of a positive therapeutic response in the subject to a treatment with the inhibitor of TL1A activity or expression with a positive predictive value or a specificity of at least about 51%, are detected in a sample obtained from the subject, and
wherein the inhibitor of TL1A activity or express is an antibody or antigen binding fragment thereof that binds to TL1A and comprises:
a heavy chain variable region comprising SEQ ID NO: 302 X1VQLVQSGAEVKKPGASVKVSCKAS[HCDR1]WVX2QX3PGQGLEW X4G[HCDR2]RX5TX6TX7DTSTSTX8YX9ELSSLRSEDTAVYYC[HCDR3]WGQGTTVTVSS, and
a light chain variable region comprising SEQ ID NO: 303 EIVLTQSPGTLSLSPGERATLSC[LCDR1]WYQQKPGQAPRX10X11IY[L CDR2]GIPDRFSGSGSGTDFTLTISRLEPEDFAVYYC[LCDR3]FGGGTKL EIK, wherein each of X1-X11 is independently selected from A, R, N, D, C, Q, E, G, H, I, L, K, M, F, P, S, T, W, Y, or V.

22. The method of any one of claims 20-21, wherein the at least three polymorphisms comprises rs16901748, rs56124762, rs6478109, rs1892231, rs2070558, rs2070561, rs11897732, rs6740739, rs17796285, rs7935393, rs12934476, rs12457255, rs2070557, rs4246905, rs10974900, rs12434976, rs2815844, rs889702, rs2409750, rs1541020, rs4942248, rs12934476, rs12457255, rs2297437, rs41309367, rs10733509, rs10750376, rs10932456, rs1326860, rs1528663, rs951279, rs9806914, rs7935393, rs1690492, rs420726, rs7759385, rs10974900, rs1326860, rs2548147, rs2815844, rs889702, rs9806914, rs7278257, or rs11221332, or a proxy polymorphism in linkage disequilibrium therewith as determined with an R² of at least 0.85, or a combination thereof.

23. A method of treating an inflammatory, a fibrotic, or a fibrostenotic disease or condition in a subject, the method comprising administering to the subject a therapeutically effective amount of an inhibitor of Tumor necrosis factor-like cytokine 1A (TL1A) activity or expression,
wherein at least three polymorphisms comprise rs16901748, rs56124762, rs6478109,
rs1892231, rs2070558, rs2070561, rs11897732, rs6740739, rs17796285, rs7935393,
rs12934476, rs12457255, rs2070557, rs4246905, rs10974900, rs12434976,
rs2815844, rs889702, rs2409750, rs1541020, rs4942248, rs12934476, rs12457255,
rs2297437, rs41309367, rs10733509, rs10750376, rs10932456, rs1326860,
rs1528663, rs951279, rs9806914, rs7935393, rs1690492, rs420726, rs7759385,
rs10974900, rs1326860, rs2548147, rs2815844, rs889702, rs9806914, rs7278257, or
rs11221332, or a proxy polymorphism in linkage disequilibrium therewith as determined with an R² of at least 0.85, or a combination thereof, are detected in a sample obtained from the subject, and
wherein the inhibitor of TL1A activity or express is an antibody or antigen binding fragment thereof that binds to TL1A and comprises:
a heavy chain variable region comprising SEQ ID NO: 301 X1VQLVQSGAEVKKPGASVKVSCKAS[HCDR1]WVX2QX3PGQGLEW X4G[HCDR2]RX5TX6TX7DTSTSTX8YX9ELSSLRSEDTAVYYCAR[HC DR3]WGQGTTVTVSS, and
a light chain variable region comprising SEQ ID NO: 303 EIVLTQSPGTLSLSPGERATLSC[LCDR1]WYQQKPGQAPRX10X11IY[L CDR2]GIPDRFSGSGSGTDFTLTISRLEPEDFAVYYC[LCDR3]FGGGTKL EIK, wherein each of X1-X11 is independently selected from A, R, N, D, C, Q, E, G, H, I, L, K, M, F, P, S, T, W, Y, or V.

24. A method of treating an inflammatory, a fibrotic, or a fibrostenotic disease or condition in a subject, the method comprising administering to the subject a therapeutically effective amount of an inhibitor of Tumor necrosis factor-like cytokine 1A (TL1A) activity or expression,
wherein at least three polymorphisms comprise rs16901748, rs56124762, rs6478109,
rs1892231, rs2070558, rs2070561, rs11897732, rs6740739, rs17796285, rs7935393,
rs12934476, rs12457255, rs2070557, rs4246905, rs10974900, rs12434976,
rs2815844, rs889702, rs2409750, rs1541020, rs4942248, rs12934476, rs12457255,
rs2297437, rs41309367, rs10733509, rs10750376, rs10932456, rs1326860,
rs1528663, rs951279, rs9806914, rs7935393, rs1690492, rs420726, rs7759385,
rs10974900, rs1326860, rs2548147, rs2815844, rs889702, rs9806914, rs7278257, or
rs11221332, or a proxy polymorphism in linkage disequilibrium therewith as determined with an R² of at least 0.85, or a combination thereof, are detected in a sample obtained from the subject, and
wherein the inhibitor of TL1A activity or express is an antibody or antigen binding fragment thereof that binds to TL1A and comprises:
a heavy chain variable region comprising SEQ ID NO: 302 X1VQLVQSGAEVKKPGASVKVSCKAS[HCDR1]WVX2QX3PGQGLEW X4G[HCDR2]RX5TX6TX7DTSTSTX8YX9ELSSLRSEDTAVYYC[HCDR3]WGQGTTVTVSS, and
a light chain variable region comprising SEQ ID NO: 303 EIVLTQSPGTLSLSPGERATLSC[LCDR1]WYQQKPGQAPRX10X11IY[L CDR2]GIPDRFSGSGSGTDFTLTISRLEPEDFAVYYC[LCDR3]FGGGTKL EIK, wherein each of X1-X11 is independently selected from A, R, N, D, C, Q, E, G, H, I, L, K, M, F, P, S, T, W, Y, or V

25. The method of any one of claims 20-24, wherein:
(A) X1 IS Q ORE;
(B) X2 IS R OR K
(C) X3 IS A OR R;
(D) X4 IS M OR I;
(E) X5 IS V OR A;
(F) X6 IS M OR I;
(G) X7 IS R OR T;
(H) X8 IS V OR A;
(I) X9 IS M OR L
(J) X10 IS L OR P;
(K) X11 IS L OR W; OR
(L) X1-X11 ARE ANY COMBINATION OF (A) TO (K).

26. The method of any one of claims 20-24, wherein the antibody or antigen binding fragment comprises a heavy chain CDR1 as set forth by SEQ ID NO: 1, a heavy chain CDR2 as set forth by any one of SEQ ID NOS: 2-5, a heavy chain CDR3 as set forth by any one of SEQ ID NOS: 6-9, a light chain CDR1 as set forth by SEQ ID NO: 10, a light chain CDR2 as set forth by SEQ ID NO: 11, and a light chain CDR3 as set forth by any one of SEQ ID NOS: 12-15.

27. The method of any one of claims 20-24, wherein the antibody or antigen binding fragment comprises a heavy chain framework (FR) 1 as set forth by SEQ ID NO: 304, a heavy chain FR2 as set forth by SEQ ID NO: 305 or SEQ ID NO: 313, a heavy chain FR3 as set forth by any one of SEQ ID NOS: 306, 307, 314, or 315, a heavy chain FR4 as set forth by SEQ ID NO: 308, a light chain FR1 as set forth by SEQ ID NO: 309, a light chain FR2 as set forth by SEQ ID NO: 310, a light chain FR3 as set forth by SEQ ID NO: 311, or a light chain FR4 as set forth by SEQ ID NO: 312, or a combination thereof.

28. The method of any one of claims 1-27, wherein the antibody or antigen binding fragment comprises a human IgG1 Fc region comprising (a) 297A, 297Q, 297G, or 297D, (b) 279F, 279K, or 279L, (c) 228P, (d) 235A, 235E, 235G, 235Q, 235R, or 235S, (e) 237A, 237E, 237K, 237N, or 237R, (f) 234A, 234V, or 234F, (g) 233P, (h) 328A, (i) 327Q or 327T, (j) 329A, 329G, 329Y, or 329R (k) 331S, (1) 236F or 236R, (m) 238A, 238E, 238G, 238H, 238I, 238V, 238 W, or 238Y, (n) 248A, (o) 254D, 254E, 254G, 254H, 254I, 254N, 254P, 254Q, 254T, or254V, (p) 255N, (q) 256H, 256K, 256R, or 256V, (r) 2645, (s) 265H, 265K, 265S, 265Y, or 265A, (t) 267G, 267H, 267I, or 267K, (u) 268K, (v) 269N or 269Q, (w) 270A, 270G, 270M, or 270N, (x) 271T, (y) 272N, (z) 292E, 292F, 292G, or 2921, (aa) 293S, (bb) 301 W, (cc) 304E, (d d) 311E, 311G, or 311S, (e e) 316F, (ff) 328V, (gg) 330R, (hh) 339E or 339L, (ii) 343I or 343V, (jj) 373A, 373G, or 373S, (kk) 376E, 376 W, or 376Y, (11) 380D, (mm) 382D or 382P, (nn) 385P, (oo) 424H, 424M, or 424V, (pp) 434I, (qq) 438G, (rr) 439E, 439H, or 439Q, (ss) 440A, 440D, 440E, 440F, 440M, 440T, or 440V, (tt) E233P, (uu) L235E, (vv) L234A and L235A, (ww) L234A, L235A, and G237A, (xx) L234A, L235A, and P329G, (yy) L234F, L235E, and P331S, (zz) L234A, L235E, and G237A, (aaa), L234A, L235E, G237A, and P331S (bbb) L234A, L235A, G237A, P238 S, H268A, A330S, and P331 S (IgG1σ, (ccc) L234A, L235A, and P329A, (ddd) G236R and L328R, (eee) G237A, (fff) F241A, (ggg) V264A, (hhh) D265A, (iii) D265A and N297A, (jjj) D265A and N297G, (kkk) D270A, (111) A330L, (mmm) P331A or P331S, or (nnn) any combination of two or more selected from (a)-(uu), per Kabat numbering.

29. The method of any one of claims 1-27, wherein the antibody or antigen binding fragment comprises a human IgG4 Fc region.

30. The method of any one of claims 1-27, wherein the antibody or antigen binding fragment comprises a Fc region comprising a sequence at least about 90%, 91%, 92%, 93%, 94%, 95%, 96%, 97%, 98%, 99%, or 100% identical to any one of SEQ ID NOS: 320-362.

31. The method of any one of claims 1-27, wherein the antibody of antigen binding fragment comprises and a fragment crystallizable (Fc) region comprising reduced antibody-dependent cell-mediated cytotoxicity (ADCC) function as compared to human IgG1 and/or reduced complement-dependent cytotoxicity (CDC) as compared to human IgG1.

32. The method of any one of claims 1-27, wherein the Fc comprises the human IgG1 comprises SEQ ID NO: 320.

33. The method of any one of claims 1-27, wherein the ADCC function of the Fc region comprising reduced ADCC is at least about 50% reduced as compared to human IgG1.

34. wherein the CDC function of the Fc region comprising reduced CDC is at least about 50% reduced as compared to human IgG1.

35. The method of any one of claims 1-27, wherein the Fc comprises (i) a human IgG4 Fc region or (ii) a human IgG4 Fc region comprising (a) S228P, (b) S228P and L235E, or (c) S228P, F234A, and L235A, per Kabat numbering.

36. The method of any one of claims 1-27, wherein the Fc comprises a human IgG2 Fc region; IgG2-IgG4 cross-sub class Fc region; IgG2-IgG3 cross-sub class Fc region; IgG2 comprising H268Q, V309L, A330S, P331S (IgG2m4); or IgG2 comprising V234A, G237A, P238S, H268A, V309L, A330S, P331S (IgG2σ).

37. The method of any one of claims 1-27, wherein the Fc comprises a human IgG1 with a substitution selected from 329A, 329G, 329Y, 331S, 236F, 236R, 238A, 238E, 238G, 238H, 238I, 238V, 238 W, 238Y, 248A, 254D, 254E, 254G, 254H, 254I, 254N, 254P, 254Q, 254T, 254V, 2645, 265H, 265K, 265S, 265Y, 265A, 267G, 267H, 267I, 267K, 434I, 438G, 439E, 439H, 439Q, 440A, 440D, 440E, 440F, 440M, 440T, and 440V, per Kabat numbering.

38. The method of any one of claims 1-27, wherein the Fc comprises a sequence at least about 90%, 91%, 92%, 93%, 94%, 95%, 96%, 97%, 98%, 99%, or 100% identical to any one of SEQ ID NOS: 320-362.

39. The method of any one of claims 1-27, wherein the Fc comprises any one of SEQ ID NOs: 401-413 or a sequence at least about 90%, 91%, 92%, 93%, 94%, 95%, 96%, 97%, 98%, or 99% identical to any one of SEQ ID NOs: 401-413.

40. The method of any one of claims 1-27, wherein the antibody or antigen binding fragment comprises a heavy chain comprising any one of SEQ ID NOs: 501-513 or a sequence at least about 90%, 91%, 92%, 93%, 94%, 95%, 96%, 97%, 98%, or 99% identical to any one of SEQ ID NOs: 501-513.

41. The method of any one of claims 1-27, wherein the antibody or antigen binding fragment comprises a light chain comprising any one of SEQ ID NO: 514 or a sequence at least about 90%, 91%, 92%, 93%, 94%, 95%, 96%, 97%, 98%, or 99% identical to any one of SEQ ID NO: 514.

42. The method of any one of claims 1-41, wherein the at least three polymorphisms are predictive of the positive therapeutic response with the positive predictive value and a specificity of at least about 51%.

43. The method of any one of claims 1-41, wherein the positive predictive value is greater than or equal about 60%, 65%, 70%, 75%, 76%, 77%, 78%, 79%, 80%, 81%, 82%, 83%, 84%, 85%, 86%, 87%, 88%, 89%, 90%, 91%, 92%, 93%, 94%, 95%, 96%, 97%, 98%, 99%, or 100%.

44. The method of any one of claims 1-41, wherein the positive predictive value is between about 60%-100%, 65%-95%, 70%-90%, 75%-85%, and 70%-80%.

45. The method of any one of claims 1-41, wherein the specificity is greater than or equal to about 60%, 65%, 70%, 75%, 76%, 77%, 78%, 79%, 80%, 81%, 82%, 83%, 84%, 85%, 86%, 87%, 88%, 89%, 90%, 91%, 92%, 93%, 94%, 95%, 96%, 97%, 98%, 99%, or 100%.

46. The method of any one of claims 1-41, wherein the specificity is between about 60%-100%, 65%-95%, 70%-90%, 75%-85%, and 70%-80%.

47. The method of any one of claims 1-41, wherein the at least three polymorphisms comprise: rs6478109, rs56124762, and rs1892231.

48. The method of any one of claims 1-41, wherein the at least three polymorphisms comprise: rs6478109, rs56124762, and rs16901748.

49. The method of any one of claims 1-41, wherein the at least three polymorphisms comprise: rs6478109, rs1892231, and rs16901748.

50. The method of any one of claims 1-41, wherein the at least three polymorphisms comprise: rs56124762, rs1892231, and rs16901748.

51. The method of any one of claims 1-41, wherein the at least three polymorphisms comprise: rs6478109, rs2070558, and rs1892231.

52. The method of any one of claims 1-41, wherein the at least three polymorphisms comprise: rs6478109, rs2070558, and rs16901748.

53. The method of any one of claims 1-41, wherein the at least three polymorphisms comprise: rs6478109, rs1892231, and rs16901748.

54. The method of any one of claims 1-41, wherein the at least three polymorphisms comprise: rs2070558, rs1892231, and rs16901748.

55. The method of any one of claims 1-41, wherein the at least three polymorphisms comprise: rs6478109, rs2070561, and rs1892231.

56. The method of any one of claims 1-41, wherein the at least three polymorphisms comprise: rs6478109, rs2070561, and rs16901748.

57. The method of any one of claims 1-41, wherein the at least three polymorphisms comprise: rs6478109, rs1892231, and rs16901748.

58. The method of any one of claims 1-41, wherein the at least three polymorphisms comprise: rs2070561, rs1892231, and rs16901748.

59. The method of any one of claims 1-41, wherein the at least three polymorphisms comprise: rs6478109, rs7935393, and rs1892231.

60. The method of any one of claims 1-41, wherein the at least three polymorphisms comprise: rs6478109, rs7935393, and rs9806914.

61. The method of any one of claims 1-41, wherein the at least three polymorphisms comprise: rs6478109, rs7935393, and rs7278257.

62. The method of any one of claims 1-41, wherein the at least three polymorphisms comprise: rs6478109, rs7935393, and rs2070557.

63. The method of any one of claims 1-41, wherein the at least three polymorphisms comprise: rs6478109, rs1892231, and rs9806914.

64. The method of any one of claims 1-41, wherein the at least three polymorphisms comprise: rs6478109, rs1892231, and rs7278257.

65. The method of any one of claims 1-41, wherein the at least three polymorphisms comprise: rs6478109, rs1892231, and rs2070557.

66. The method of any one of claims 1-41, wherein the at least three polymorphisms comprise: rs6478109, rs9806914, and rs7278257.

67. The method of any one of claims 1-41, wherein the at least three polymorphisms comprise: rs6478109, rs9806914, and rs2070557.

68. The method of any one of claims 1-41, wherein the at least three polymorphisms comprise: rs6478109, rs7278257, and rs2070557.

69. The method of any one of claims 1-41, wherein the at least three polymorphisms comprise: rs7935393, rs1892231, and rs9806914.

70. The method of any one of claims 1-41, wherein the at least three polymorphisms comprise: rs7935393, rs1892231, and rs7278257.

71. The method of any one of claims 1-41, wherein the at least three polymorphisms comprise: rs7935393, rs1892231, and rs2070557.

72. The method of any one of claims 1-41, wherein the at least three polymorphisms comprise: rs7935393, rs9806914, and rs7278257.

73. The method of any one of claims 1-41, wherein the at least three polymorphisms comprise: rs7935393, rs9806914, and rs2070557.

74. The method of any one of claims 1-41, wherein the at least three polymorphisms comprise: rs7935393, rs7278257, and rs2070557.

75. The method of any one of claims 1-41, wherein the at least three polymorphisms comprise: rs1892231, rs9806914, and rs7278257.

76. The method of any one of claims 1-41, wherein the at least three polymorphisms comprise: rs1892231, rs9806914, and rs2070557.

77. The method of any one of claims 1-41, wherein the at least three polymorphisms comprise: rs1892231, rs7278257, and rs2070557.

78. The method of any one of claims 1-41, wherein the at least three polymorphisms comprise: rs9806914, rs7278257, and rs2070557.

79. The method of any one of claims 1-41, wherein the at least three polymorphisms comprise: rs6478109, rs56124762, and rs1892231.

80. The method of any one of claims 1-79, wherein the at least three polymorphisms further comprises a fourth polymorphism comprising rs16901748, rs1892231, rs56124762, rs6478109, rs2070558, rs2070561, rs11897732, rs6740739, rs17796285, rs7935393, rs12934476, rs12457255, rs2070557, rs4246905, rs10974900, rs12434976, rs2815844, rs889702, rs2409750, rs1541020, rs4942248, rs12934476, rs12457255, rs2297437, rs41309367, rs10733509, rs10750376, rs10932456, rs1326860, rs1528663, rs951279, rs9806914, rs7935393, rs1690492, rs420726, rs7759385, rs10974900, rs1326860, rs2548147, rs2815844, rs889702, rs9806914, rs7278257, or rs11221332, or a proxy polymorphism in linkage disequilibrium therewith as determined with an R² of at least 0.85, or a combination thereof.

81. The method of any one of claims 1-80, wherein the at least three polymorphisms are detected in the sample by subjecting the sample to an assay configured to detect a presence of at least three nucleotides corresponding to nucleic acid position 501 within at least three of SEQ ID NOS: 2001-20041, or 20057-20059.

82. The method of any one of claims 1-81, wherein the inflammatory, fibrotic, or fibrostenotic disease or condition comprises inflammatory bowel disease, Crohn's disease, obstructive Crohn's disease, ulcerative colitis, intestinal fibrosis, intestinal fibrostenosis, rheumatoid arthritis, pulmonary fibrosis, scleroderma, or primary sclerosing cholangitis.

83. The method of claim 82, wherein the Crohn's disease is ileal, ileocolonic, or colonic Crohn's disease.

84. The method of claim 82, wherein the pulmonary fibrosis comprises idiopathic pulmonary fibrosis.

85. The method of any one of claims 1-83, wherein the subject has, or is at risk for developing, a non-response or loss-of-response to a standard therapy comprising glucocorticosteriods, anti-TNF therapy, anti-a4-b7 therapy, anti-IL12p40 therapy, or a combination thereof.

86. The method of any one of claims 1-85, further comprising determining whether the subject with an inflammatory, a fibrotic, or a fibrostenotic disease or condition is suitable for treatment with an inhibitor of TL1A activity or expression based, at least in part, on the at least three polymorphisms detected in the sample.

87. The method of any one of claims 1-86, further comprising obtaining, or having obtained, the sample from the subject.

88. The method of any one of claims 1-87, wherein the at least three polymorphisms are detected in utilizing assay comprising a quantitative polymerase chain reaction (qPCR), nucleic acid sequencing reaction, or a genotyping array.

89. The method of any one of claims 1-88, wherein the at least three polymorphisms comprise:
(i) three polymorphisms selected from Table 1;
(ii) four polymorphisms selected from Table 1;
(iii) five polymorphisms selected from Table 1;
(iv) six polymorphisms selected from Table 1;
(v) seven polymorphisms selected from Table 1;
(vi) eight polymorphisms from one or more 8-SNP models provided in Table 25
(vii) nine polymorphisms selected from Table 1; or
(viii) ten polymorphisms selected from Table 1.
